(19) United States
(12) Patent Application Publication
(10) Pub. No.: US 2024/0116993 A1
(43) Pub. Date: Apr. 11, 2024

(54) COMPOSITIONS AND METHODS OF USE THEREOF FOR THE TREATMENT OF DUCHENNE MUSCULAR DYSTROPHY

(71) Applicant: HUNTERIAN MEDICINE LLC, Cambridge, MA (US)

(72) Inventor: Vinod Jaskula-Ranga, Cambridge, MA (US)

(21) Appl. No.: 18/186,919

(22) Filed: Mar. 20, 2023

Related U.S. Application Data
(63) Continuation of application No. 16/761,112, filed on May 1, 2020, now abandoned.
(60) Provisional application No. 62/581,493, filed on Nov. 3, 2017.

(51) Int. Cl. C07K 14/47; A61K 48/00; C12N 15/113; C12N 15/86

(52) U.S. Cl. CPC C07K 14/4708; A61K 48/005; C12N 15/113; C12N 15/86; A61K 38/00; C12N 2310/20

(57) ABSTRACT

The present disclosure provides, in part, a method of treating subjects with Duchenne muscular dystrophy (DMD) via gene editing approaches that induce exon deletion(s) to restore the reading frame of the dystrophin gene, thereby restoring dystrophin protein activity. The invention also provides compositions comprising adeno-associated viral vectors, an RNA-guided nucleases, nickases or DNA endonucleases, and guide RNAs for use in the treatment of subjects with DMD, or subjects with other neuromuscular genetic diseases or disorders.

### CROSS-REFERENCE TO RELATED APPLICATIONS

[0001] This application is a continuation application of U.S. patent application Ser. No. 16/761,112, filed May 1, 2020, which is a U.S. national stage application, filed under 35 U.S.C. § 371, of International Application No. PCT/US2018/059074, filed on Nov. 2, 2018, which claims the benefit of U.S. Provisional Patent Application No. 62/581,493, filed Nov. 3, 2017, the entire contents of each of which are incorporated by reference herein.

### REFERENCE TO A SEQUENCE LISTING XML

[0002] This application contains a Sequence Listing which has been submitted electronically in XML format. The Sequence Listing XML is incorporated herein by reference. Said XML file, created on Oct. 31, 2023, is named HUN-001C1_SL.xml and is 9,305,678 bytes in size.

### FIELD OF THE INVENTION

[0003] The present disclosure relates to the fields of molecular biology, medicine and genetics. In particular, the present disclosure provides therapeutic compositions and their use in genome editing based methods for the treatment of Duchenne muscular dystrophy and other genetic diseases or disorders.

### BACKGROUND OF THE INVENTION

[0004] Duchenne muscular dystrophy (DMD) is an X-linked neuromuscular disorder and is the most frequent lethal heritable childhood disease: DMD affects approximately 1 in 3500 to 5000 boys. DMD is a severe disease, characterized by progressive muscle weakness that leads to DMD patients being confined to wheelchairs by the age of 12, and ultimately death at around age 25.

[0005] DMD is caused by a wide variety of mutations in the gene encoding dystrophin at locus Xp21, located on the short arm of the X chromosome. The dystrophin gene product is a large intracellular protein that links the dystroglycan complex at the cell surface with the underlying cytoskeleton. As such, dystrophin protein maintains the integrity of muscle cell membranes during contraction. With 79 exons, the dystrophin gene is one of the largest protein encoding genes in the human genome, and this size makes the dystrophin gene prone to alterations such as deletions and duplications. Frame disrupting alterations to the dystrophin gene result in premature stop codons, and subsequently lead to a truncated protein. Truncated dystrophin proteins cannot provide the structural support necessary to withstand the stress of muscle contraction. This leads to muscle fiber damage and membrane leakage that ultimately manifest as the muscle wasting, breathing complications, and cardiomyopathy that are symptomatic of DMD.

[0006] Many different therapeutic strategies for DMD have been explored over the years but existing approved treatments are palliative at best. Beta-2 adrenergic receptor agonists are sometimes used to increase muscle strength, but they do not modify disease progression. A common treatment for DMD is the use of steroids (e.g., prednisone and deflazacort) that have been found to be effective in slowing the course of muscle loss. However, such treatment can lead to side effects such as delayed onset of puberty. Also, rapid withdrawal of corticosteroids can result in life-threatening complications. Additionally, several gene- and cell-based therapies have been developed that aim to deliver functional dystrophin genes or proteins to diseased muscle tissue. However, these approaches have been challenged by the large size of the dystrophin gene, low efficiency, limited persistence of transgene expression, and the host immune response to the vectors used to package the dystrophin gene or protein. As such, no curative treatment for DMD currently exists.

[0007] Accordingly, there is a clear, on-going, and urgent need to develop new approaches for the treatment of DMD that provide lifelong restoration of dystrophin expression and activity in the various muscles of the body, in order to improve patient quality of life and to reduce DMD associated morbidity. Recent advances in genome editing technologies, to correct a gene carrying a harmful mutation for example, have sparked enthusiasm and hope for the development of such novel therapeutic strategies for DMD, as well as other genetic diseases, disorders or conditions. Thus, the present disclosure provides genome editing methods, and compositions for use in such methods, for the treatment of DMD and other genetic muscular, neurological, or other diseases, disorders or conditions.

### SUMMARY OF THE INVENTION

[0008] The present disclosure presents a genome engineering approach to address the genetic basis of DMD, as well as other genetic diseases, disorders or conditions. The present disclosure provides gene editing methods to create changes to the genome of such patients that can restore the reading frame and the protein activity of mutated genes, thereby effecting permanent corrections to the underlying genetic defect causing the disease, disorder or condition.

[0009] Described herein in part is a method of treating a subject (e.g., a human) with Duchenne muscular dystrophy (DMD), comprising administering to the subject a composition comprising an adeno-associated viral vector, an RNA-guided nuclease or nickase or a DNA endonuclease, and at least one dystrophin-targeted guide RNA in amount sufficient to delete a skippable exon encoding the dystrophin gene, wherein the subject with DMD has a mutation causing a frameshift in the dystrophin gene and wherein the deletion of the skippable exon prevents the frameshift. In some embodiments, preventing the frameshift in the dystrophin gene results in partial or complete restoration of dystrophin protein activity.

[0010] In some embodiments, the DNA endonuclease is a Cas9 endonuclease or a Cpf1 endonuclease. In some embodiments, the composition comprises two dystrophin-targeted guide RNAs that recognize different DNA sequences.

[0011] In some embodiments, the skippable exon is selected from the group consisting of exon 2, exon 8, exon 17, exon 43, exon 44, exon 45, exon 46, exon 50, exon 51, exon 52, exon 53, and exon 55 of the dystrophin gene. In some embodiments, the skippable exon is selected based on the deleted exon or deleted exons that specifically occur in the dystrophin gene of the subject. For example, in some embodiments, the skippable exon is selected from the list in Table 1 according to the indicated dystrophin exon deletions.

[0012] The mutation may be a deletion, an insertion, a duplication, or a translocation. In some embodiments, the mutation is a deletion of exons 3-7, 3-19, 3-21, 4-7, 5-7, 6-7, 12-16, 18-33, 18-41, 18-44, 44, 44-47, 44-49, 44-51, 14-43, 19-43, 30-43, 35-43, 36-43, 40-43, 42-43, 45, 45-54, 12-44, 18-44, 46-47, 46-48, 46-49, 46-51, 46-53, 46-55, 21-45, 47-54, 47-56, 51, 51-53, 51-55, 45-50, 47-50, 48-50, 49-50, 50, 52, 52-63, 53, 53-55, 10-52, 45-52, 46-52, 47-52, 48-52, 49-52, 50-52, 45-54, or 48-54 of the dystrophin gene.

[0013] Also provided herein is a method of treating a subject (e.g., a human) with Duchenne muscular dystrophy (DMD), comprising administering to the subject a composition comprising an adeno-associated viral vector, an RNA-guided nuclease or nickase or a DNA endonuclease, and at least one dystrophin targeted guide RNA in amount sufficient to restore the reading frame of the dystrophin gene in the subject wherein the dystrophin targeted guide RNA recognizes a target site in the dystrophin gene selected from the sequences identified in Table 2. In some embodiments, one or more target sites recognized by the at least one dystrophin targeted guide RNA occur in an intron of the dystrophin gene.

[0014] In some embodiments, the DNA endonuclease is a Cas9 endonuclease or a Cpf1 endonuclease. In some embodiments, the composition comprises two dystrophin-targeted guide RNAs that recognize different target sites.

[0015] In some embodiments, restoring the reading frame of the dystrophin gene results in partial or complete restoration of dystrophin protein activity.

[0016] The present disclosure also contemplates a method of treating a subject (e.g., a human) with a genetic disease or disorder, comprising a gene editing strategy comprising administering to the subject a composition comprising an adeno-associated viral vector, an RNA-guided nuclease or nickase or a DNA endonuclease, at least one guide RNA, and optionally a donor DNA template in an amount sufficient (i) to delete a skippable exon encoding a mutated gene, wherein such deletion prevents a frameshift of the mutated gene; or (ii) to correct the DNA sequence of the mutated gene via homology directed repair (HDR), wherein the mutated gene is associated with the cause of the disease or disorder; and wherein said method of treatment reduces at least one symptom associated with the disease or disorder. The donor DNA template may comprise a correct DNA sequence (e.g., a wild type or non-mutated sequence) for insertion in the mutated gene via a homology directed repair mechanism.

[0017] In some embodiments, the DNA endonuclease is a Cas9 endonuclease or a Cpf1 endonuclease. In some embodiments, the composition comprises two guide RNAs that recognize different target sites. In some embodiments, the guide RNA(s) recognizes a target site in a gene selected from the group consisting of MYH7, TNNT2, TPM1, MYBPC3, PRKAG2, TNNI3, MYL3, TNN, MYL2, ACTC1, CSRP3, TNNC1, MYH6, VCL, MYOZ2, JPH2, PLN, CALR3, NEXN, MYPN, ACTN2, LDB3, TCAP, FLNC, SOD1, C90RF72, and RYR.

[0018] In some embodiments, the genetic disease or disorder can be a muscle-related disease or disorder selected from the group consisting of Hypertrophic cardiomyopathy (HCM or CMH), amyotrophic lateral sclerosis, Becker's muscular dystrophy, central core disease, centronuclear myopathy (including myotubular myopathy), Charcot-Marie-Tooth disease, congenital muscular dystrophy, congenital myasthenic syndrome, Dejerine-Sottas disease, dermatomyositis, Duchenne muscular dystrophy, Emery-Dreifuss muscular dystrophy, facioscapulohumeral muscular dystrophy, Friedreich's ataxia, hyperthyroid myopathy, hypothyroid myopathy, inclusion body myositis, Lambert-Eaton myasthenic syndrome, Limb-girdle muscular dystrophy, mitochondrial myopathy, myasthenia gravis, myotonia congenita (including Thomsen's disease and Becker disease), nemaline myopathy, paramyotonia congenita, periodic paralysis (including hypokalemic and hyperkalemic), polymyositis, spinal and bulbar muscular atrophy, and spinal muscular atrophy.

[0019] In some embodiments the disease or disorder is suitable for treatment by an exon skipping therapeutic strategy. For example, in some embodiments, the subject to be treated has a disease or disorder selected from the group comprising Ataxia-telangiectasia, congenital disorder of glycosylation, fronto-temporal dementia and parkinsonism linked to chromosome 17, Niemann-Pick disease type C, neurofibromatosis type 1, neurofibromatosis type 2, megalencephalic leukoencephalopathy with subcortical cysts type 1, Pelizaeus-Merzbacher disease, familial dysautonomia, Marfan syndrome, and Loeys-Dietz syndrome.

[0020] Other objects, features and advantages of the present disclosure will become apparent from the following detailed description. It should be understood, however, that the detailed description and the specific examples, while indicating specific embodiments of the disclosure, are given by way of illustration only, since various changes and modifications within the spirit and scope of the disclosure will become apparent to those skilled in the art from this detailed description.

### BRIEF DESCRIPTION OF THE DRAWINGS

[0021] FIG. 1 is a schematic representation of the exonic structure of the human dystrophin gene. The dystrophin gene is the largest know protein coding human gene with 79 exons encoded by over 2 million base pairs.

[0022] FIGS. 2A-2D are schematic representations of frame shifting alterations in the human dystrophin gene and various genome editing strategies employed to correct them. FIG. 2A is a schematic representation of a frameshifting deletion of exon 50 within the dystrophin gene that results in a premature stop codon leading to a truncated and defective dystrophin protein. FIG. 2B depicts a single exon skipping strategy to correct the frameshifting alteration from FIG. 2A. Skipping of exon 51 by direct splicing of exon 49 to exon 52 prevents the frameshift and restores the reading frame of the dystrophin gene. FIG. 2C depicts a multiple exon skipping strategy to correct the frameshifting alteration from FIG. 2A. Skipping of exons 51-53 by direct splicing of exon 49 to exon 54 prevents the frameshift and restores the reading frame of the dystrophin gene. FIG. 2D depicts a repair strategy to correct the frameshifting alteration from FIG. 2A. A template with the correct wild type DNA sequence can be used to insert a correct copy of exon 50 through homology directed repair. This strategy will prevent the frameshift and lead to a functional, full length dystrophin protein product.

[0023] FIGS. 3A-3C are schematic representations of frame shifting alterations in the human dystrophin gene and various genome editing strategies employed to correct them. FIG. 3A is a schematic representation of a duplication of exon 2 of the dystrophin gene that results in a premature stop codon leading to a truncated and defective dystrophin protein. FIG. 3B shows an exon skipping strategy to correct the frameshifting alteration from FIG. 3A. The extra copy of exon 2 is skipped to prevent the frameshifting alteration. FIG. 3C shows an exon removal strategy in which the extra copy of exon 2 is deleted to prevent the frameshifting alteration from FIG. 3A.

[0024] FIG. 4 depicts a gene editing strategy to correct an R1667C mutation of the Ryr1 gene that occurs in central core disease. FIG. 4A is a genome browser view of a portion of the sequence of exon 34 of the human Ryr1 gene in which a C to T mutation effects a R1667C missense mutation. hs059742637 (5′-AGTGGAAGCGCTGCAGGTCCAGG-3′ (SEQ ID NO: 1) and hs059742644 (5′-CGCCCTGGGCAACAATCGCGTGG-3′ (SEQ ID NO: 2)) correspond to guide RNA sequences that direct the SpCas9 nickase to induce single strand breaks at DNA sites complementary to the guide RNA sequence. FIG. 4A discloses SEQ ID NOs: 10508-10509, respectively, in order of appearance. FIG. 4B depicts the overall strategy: a composition comprising an adeno-associated viral vector expressing the 2 guide RNAs and the SpCas9 nickase in combination with a second adeno-associated viral vector expressing a donor DNA template with the correct exon 34 sequence is used to mediate homology directed repair and correct the mutated Ryr1 gene.

[0025] FIG. 5 depicts a gene editing strategy to correct an T4709M mutation of the Ryr1 gene that occurs in central core disease. FIG. 5A is a genome browser view of a portion of the sequence of exon 96 of the human Ryr1 gene in which a C to T mutation effects a T4709M missense mutation. hs059750155 (5′-CTGGTGCTCAACACGCCGTAAGG-3′ (SEQ ID NO: 3)) and hs059750156 (5′-ACGGCGTGTTGAGCACCAGTCGG-3′ (SEQ ID NO: 4)) are exemplary guide RNA sequences that direct the SpCas9 nuclease to induce double strand breaks at DNA sites complementary to the guide RNA sequence. Either guide RNA can be used. FIG. 5A discloses SEQ ID NOs: 10510-10511, respectively, in order of appearance. FIG. 5B depicts the overall strategy: a composition comprising an adeno-associated viral vector expressing the guide RNA (e.g., hs059750155 or hs059750156) and the SpCas9 nuclease in combination with a second adeno-associated viral vector expressing a donor DNA template with the correct exon 96 sequence is used to mediate homology directed repair and correct the mutated Ryr1 gene.

[0026] FIG. 6A depicts a gene editing strategy to maintain the correct coding frame for nonsense mutations in exon 51 of DMD. The two targeting guide RNAs are indicated (hs132637319) and hs132637262), along with amplifying PCR primers. The entire amplicon is ˜1,450 bp, and the expected deletion from both guide RNAs is ˜630 bp. This deletion, resulting in exon-skipping is expected to maintain coding frame for non-sense mutations. FIG. 6B depicts a PCR analysis following transfection indicates the deleted product at the expected size. FIG. 6C depicts a sequencing analysis which confirmed the deleted product following targeting. FIG. 6C discloses SEQ ID NOs: 10512-10513, respectively, in order of appearance.

[0027] FIG. 7A depicts an Interference of CRISPR Edits (ICE) analysis indicating cutting of the mouse DMD gene and mutations around the expected site (dotted line) following infection. AAV was used to deliver Cpf1 and a single guide RNA in mouse N2a cells. The WT sequence is indicated. FIG. 7A discloses SEQ ID NOs: 10514-10533, respectively, in order of appearance. FIG. 7B depicts an ICE analysis indicating cutting of the mouse DMD gene and mutations around the expected site (dotted line) following infection. AAV was used to deliver Cpf1 and a two targeting guide RNAs in mouse N2a cells: one that targets WT sequence (indicated), and one that targets the mdx mutation, a point mutation in the mouse DMD gene. The WT sequence is indicated FIG. 7B discloses SEQ ID NOs: 10514, 10534-10541, 10528, and 10542-10545, respectively, in order of appearance. FIG. 7C depicts an ICE analysis indicating cutting of the mouse DMD gene and mutations around the expected site (dotted line) following transfection of MAD7 nuclease. The WT sequence is indicated. FIG. 7C discloses SEQ ID NOs: 10514, 10546, 10518, 10547-10548, 10524, 10549, 10531, and 10550-10552, respectively, in order of appearance.

### DETAILED DESCRIPTION

[0028] The present disclosure is based in part, upon advancements in gene editing technology that have enhanced the ability to correct genetic defects in cells, thereby providing new avenues for treatment, as well as potential cures for genetic diseases or disorders. The present disclosure provides methods of treating subjects with genetic diseases or disorders through adeno-associated viral vector delivery of some CRIPSR systems (e.g., CRIPSR/Cas9 or CRIPSR/Cpf1) in order to edit the genomes of cells carrying defects in a mutated gene (e.g., dystrophin) to generate a precise corrective modification at the target locus, thereby restoring the activity of the mutated gene product. These and other aspects of the disclosure are set out in detail below.

### Definitions

[0029] The following definitions are included for the purpose of understanding the present subject matter and for constructing the appended patent claims.

[0030] Throughout the application, where compositions are described as having, including, or comprising specific components, or where processes are described as having, including, or comprising specific process steps, it is contemplated that compositions of the present teachings also consist essentially of, or consist of, the recited components, and that the processes of the present teachings also consist essentially of, or consist of, the recited process steps.

[0031] In the application, where an element or component is said to be included in and/or selected from a list of recited elements or components, it should be understood that the element or component can be any one of the recited elements or components, or the element or component can be selected from a group consisting of two or more of the recited elements or components. Further, it should be understood that elements and/or features of a composition, an apparatus, or a method described herein can be combined in a variety of ways without departing from the spirit and scope of the present teachings, whether explicit or implicit herein.

[0032] It should be understood that the expression “at least one of” includes individually each of the recited objects after the expression and the various combinations of two or more of the recited objects unless otherwise understood from the context and use.

[0033] The use of the term “include,” “includes,” “including,” “have,” “has,” “having,” “contain,” “contains,” or “containing,” including grammatical equivalents thereof, should be understood generally as open-ended and non-limiting, for example, not excluding additional unrecited elements or steps, unless otherwise specifically stated or understood from the context.

[0034] The use of the singular herein, for example, “a,” “an,” or “the,” includes the plural (and vice versa) unless specifically stated otherwise.

[0035] It should be understood that the order of steps or order for performing certain actions is immaterial so long as the present teachings remain operable. Moreover, two or more steps or actions can be conducted simultaneously.

[0036] At various places in the present specification, values are disclosed in groups or in ranges. It is specifically intended that the description include each and every individual subcombination of the members of such groups and ranges and any combination of the various endpoints of such groups or ranges. For example, an integer in the range of 0 to 40 is specifically intended to individually disclose 0, 1, 2, 3, 4, 5, 6, 7, 8, 9, 10, 11, 12, 13, 14, 15, 16, 17, 18, 19, 20, 21, 22, 23, 24, 25, 26, 27, 28, 29, 30, 31, 32, 33, 34, 35, 36, 37, 38, 39, and 40, and an integer in the range of 1 to 20 is specifically intended to individually disclose 1, 2, 3, 4, 5, 6, 7, 8, 9, 10, 11, 12, 13, 14, 15, 16, 17, 18, 19, and 20.

[0037] The use of any and all examples, or exemplary language herein, for example, “such as,” “including,” or “for example,” is intended merely to better illustrate the present teachings and does not pose a limitation on the scope of the invention unless claimed. No language in the specification should be construed as indicating any non-claimed element as essential to the practice of the present teachings.

[0038] As used herein, the term “effective amount” or “amount sufficient” refers to the amount of a therapeutic composition or therapy that is sufficient to result in the prevention of the development, recurrence, or onset of a disease or disorder and one or more symptoms thereof, to reduce the severity or duration of a disease or disorder, to ameliorate one or more symptoms of a disease or disorder, to prevent the advancement of a disease or disorder, to cause regression of a disease or disorder, and/or to enhance or improve the therapeutic effect(s) of another therapy. In an embodiment, the “effective amount” or “therapeutically effective amount” refers to the amount of a composition that is sufficient to effect beneficial or desired results. The therapeutically effective amount may vary depending upon one or more of: the subject and disease condition being treated, the weight and age of the subject, the severity of the disease condition, the manner of administration and the like, which can readily be determined by one of ordinary skill in the art. In a specific embodiment of the invention, a therapeutic composition in an “amount sufficient” refers to the amount of the composition needed to prevent, reduce, or alleviate at least one or more signs or symptoms of DMD, and relates to a sufficient amount of the composition to provide the desired effect, e.g., to treat a subject having DMD, The term “effective amount” therefore refers to an amount of a composition that is sufficient to promote a particular effect when administered to a typical subject, such as one who has or is at risk for DMD. An effective amount would also include an amount sufficient to delay the development of a symptom of the disease, alter the course of a symptom of the disease (for example but not limited to, slow the progression of a symptom of the disease), or reverse a symptom of the disease. It is understood that for any given case, an appropriate “effective amount” can be determined by one of ordinary skill in the art using routine experimentation.

[0039] The terms “subject” and “patient” are used interchangeably herein. The subject treated by the presently disclosed methods in their many embodiments is desirably a human subject, although it is to be understood that the methods described herein are effective with respect to all vertebrate species which are intended to be included in the term “subject.” Accordingly, a “subject” can include a human subject for medical purposes, such as for the treatment of an existing condition or disease or the prophylactic treatment for preventing the onset of a condition or disease, or an animal subject for medical, veterinary purposes, or developmental purposes. Suitable animal subjects include mammals including, but not limited to, primates, humans, monkey s, apes, and the like; bovines, e.g., cattle, oxen, and the like; ovines, e.g., sheep and the like: caprines, e.g., goats and the like; porcines, e.g., pigs, hogs, and the like; equines, e.g., horses, donkeys, zebras, and the like: felines, including wild and domestic cats; canines, including dogs; lagomorphs, including rabbits, hares, and the like; and rodents, including mice, rats, and the like. An animal may be a transgenic animal. In some embodiments, the subject is a human including, but not limited to, fetal, neonatal, infant, juvenile, and adult subjects. Further, a “subject” can include a patient afflicted with or suspected of being afflicted with a condition or disease.

[0040] As used herein, the terms “treat,” “treatment,” and “treating” in the context of the administration of a therapeutic composition to a subject refer to the reversing, reduction or inhibition of the progression and/or duration of the disease, preventing or reducing the likelihood of the disease, reduction or amelioration of the severity, and/or the amelioration of one or more symptoms of the disease, disorder, or condition to which such term applies resulting from the administration of one or more therapies. In some embodiments, the treatment reduces the amount of defective dystrophin protein in cells (e.g., muscle cells) of the subject. For example, the treatment can reduce the amount of defective dystrophin protein in cells (e.g., muscle cells) of the subject by at least 5%, 10%, 15%, 20%, 25%, 30%, 33%, 35%, 40%, 45%, 50%, 55%, 60%, 70%, 75%, 80%, 85%, 90%, 91%, 92%, 93%, 94%, 95%, 96%, 97%, 98%, 99% or more as compared to the amount of defective dystrophin in cells in a subject before undergoing treatment or in a subject who does not undergo treatment. In some embodiments, the treatment increases the amount of dystrophin protein activity in cells (e.g., muscle cells) of the subject. For example, the treatment can increase the amount of dystrophin protein activity in by at least 5%, 10%, 15%, 20%, 25%, 30%, 33%, 35%, 40%, 45%, 50%, 55%, 60%, 70%, 75%, 80%, 85%, 90%, 91%, 92%, 93%, 94%, 95%, 96%, 97%, 98%, 99% or more as compared to the amount of dystrophin protein activity in cells in a subject before undergoing treatment or in a subject who does not undergo treatment.

[0041] As used herein, the terms “manage,” “managing,” and “management” in the context of the administration of a therapy to a subject refer to the beneficial effects that a subject derives from a therapy (e.g., a prophylactic or therapeutic composition) or a combination of therapies, while not resulting in a cure of the disease or disorder. In certain embodiments, a subject is administered one or more therapies (e.g., one or more prophylactic or therapeutic compositions) to “manage” DMD so as to prevent the progression or worsening of the condition.

[0042] As used herein, the terms “prevent,” “preventing” and “prevention” in the context of the administration of a therapy to a subject refer to the prevention or inhibition of the recurrence, onset, and/or development of a disease or disorder, or a symptom thereof in a subject resulting from the administration of a therapy (e.g., a prophylactic or therapeutic composition), or a combination of therapies (e.g., a combination of prophylactic or therapeutic compositions). In some embodiments, such terms refer to one, two, three, or more results following the administration of one or more therapies: (i) a delay in the development of a symptom of the disease, (2) an alteration of the course of a symptom of the disease (for example but not limited to, slowing the progression of a symptom of the disease), and (3) a reverse of a symptom of the disease. In some embodiments, such terms refer to a reduction in mortality and/or an increase in survival rate of a patient population. In further embodiments, such terms refer to an increase or enhancement in the quality of life of a patient population. In some embodiments, such terms refer to a decrease in hospitalization rate of a patient population and/or a decrease in hospitalization length for a patient population.

[0043] As used herein, the terms “therapies” and “therapy” can refer to any method(s), composition(s), and/or agent(s) that can be used in the prevention, treatment and/or management of a disease, disorder or condition, or one or more symptoms thereof. In certain embodiments, the terms “therapy” and “therapies” refer to steroid therapy, physical therapy, gene therapy, chemotherapy, small molecule therapy, radioimmunotherapy, toxin therapy, prodrug-activating enzyme therapy, biologic therapy, antibody therapy, surgical therapy, hormone therapy, immunotherapy, anti-angiogenic therapy, targeted therapy, epigenetic therapy, demethylation therapy, histone deacetylase inhibitor therapy, differentiation therapy, radiation therapy, or a combination of the foregoing and/or other therapies useful in the prevention, management and/or treatment of a disease, disorder or condition, or one or more symptoms thereof.

[0044] As used herein, the terms “administering” and “administered” refer to the delivery of a composition into a subject by a method or route that results in at least partial localization of the composition at a desired site. A composition can be administered by any appropriate route that results in effective treatment in the subject, i.e. administration results in delivery to a desired location in the subject where at least a portion of the composition is delivered to the desired site for a period of time. Modes of administration include injection, infusion, instillation, or ingestion. “Injection” includes, without limitation, intravenous, intramuscular, intraarterial, intrathecal, intraventricular, intracapsular, intraorbital, intracardiac, intradermal, intraperitoneal, transtracheal, subcutaneous, subcuticular, intraarticular, sub capsular, subarachnoid, intraspinal, intracerebro spinal, and intrasternal injection and infusion. In some examples, the route is intravenous.

### Methods of Treatment

[0045] In one aspect, the present disclosure provides a method for treating a subject (e.g., a human) with Duchenne muscular dystrophy (DMD). By using gene editing tools to create permanent changes to the genome that can restore the dystrophin reading frame and restore the dystrophin protein activity, the resulting therapy can correct the underlying genetic defect causing the disease. In some embodiments, the present disclosure provides a method of treating a subject with Duchenne muscular dystrophy (DMD), comprising administering to the subject a composition comprising an adeno-associated viral vector, an RNA-guided nuclease or nickase or a DNA endonuclease, and at least one dystrophin-targeted guide RNA in amount sufficient to delete a skippable exon encoding the dystrophin gene, wherein the subject with DMD has a mutation causing a frameshift in the dystrophin gene and wherein the deletion of the skippable exon prevents the frameshift.

[0046] In some embodiments, preventing the frameshift in the dystrophin gene results in partial or complete restoration of dystrophin protein activity. In some embodiments, preventing the frameshift in the dystrophin gene results in partial restoration of dystrophin protein activity. For example, in some embodiments, preventing the frameshift in the dystrophin gene increases the amount of dystrophin protein activity in the subject's cells (e.g., muscle cells). For example, the amount of dystrophin protein activity in the subject's cells (e.g., muscle cells) increases by at least 5%, 10%, 15%, 20%, 25%, 30%, 33%, 35%, 40%, 45%, 50%, 55%, 60%, 70%, 75%, 80%, 85%, 90%, 91%, 92%, 93%, 94%, 95%, 96%, 97%, 98%, 99% or more as compared to the amount of dystrophin protein activity in such cells in a subject before undergoing treatment or in a subject who does not undergo treatment. In some embodiments, preventing the frameshift in the dystrophin gene results in complete restoration of dystrophin protein activity.

[0047] In some embodiments, the DNA endonuclease is a Cas9 endonuclease or a Cpf1 endonuclease. For example, in some embodiments, the DNA endonuclease is a Cas9 endonuclease. In another embodiment, the DNA endonuclease is a Cpf1 endonuclease.

[0048] In some embodiments, the composition comprises at least one (e.g., 1, 2, 3, 4, 5 or more) dystrophin-targeted guide RNA. In some embodiments, the composition comprises one dystrophin-targeted guide RNA. In some embodiments, the composition comprises two dystrophin-targeted guide RNAs. In some embodiments, the composition comprises more than two dystrophin-targeted guide RNAs. In some embodiments, the dystrophin-targeted guide RNAs recognize different DNA sequences (also referred to as target sites). For example, in some embodiments, the composition comprises two dystrophin-targeted guide RNAs that recognize different target sites. The target site(s) recognized by the at least one dystrophin targeted guide RNA may occur in an intron and/or exon of the dystrophin gene. In some embodiments for example, the target site(s) recognized by the at least one dystrophin targeted guide RNA may occur in an intron of the dystrophin gene. In some embodiments, the composition comprises two dystrophin-targeted guide RNAs that recognize different intronic target sites. In some embodiments, the composition comprises two dystrophin-targeted guide RNAs wherein at least one guide RNA recognizes an intron target site.

[0049] Exon skipping is a strategy in which sections of genes are “skipped” during pre-mRNA splicing, to enlarge a deletion so that it becomes its nearest in-frame counterpart. In the case of DMD, this allows for the creation of a partially deleted but functional dystrophin protein (van Deutekom J, 2003). The exon skipping approach has been employed through the use of antisense oligonucleotide (AON) to modulate splicing by hiding specific sites essential for exon inclusion from the splicing machinery. However AON-mediated exon skipping has met limited success because it suffers from inefficiency of oligonucleotide tissue uptake, requirement for lifelong delivery of oligonucleotides and incomplete exon skipping. The present disclosure circumvents this challenge by providing methods that use the CRISPR systems (e.g., CRISPR/Cas9 or CRISPR/Cpf1) to destroy exon splice sites preceding DMD mutations or to delete mutant or out-of-frame exons, thereby allowing splicing between surrounding exons to recreate an in-frame dystrophin protein that lacks the mutations.

[0050] In some embodiments, the disclosed method comprises deletion of one or more (e.g., 1, 2, 3, 4, 5, 6, 7, 8, 9, 10 or more) of any of the 79 exons in the dystrophin gene. For example, in some embodiments, the disclosed method comprises deletion of one exon (for example, refer to FIG. 2B) in the dystrophin gene. In some embodiments, for example, the disclosed method comprises deletion of two exons in the dystrophin gene. In some embodiments, for example, the disclosed method comprises deletion of three exons in the dystrophin gene (for example, refer to FIG. 2C). In some embodiments, for example, the disclosed method comprises deletion of more than three of any of the 79 exons in the dystrophin gene.

[0051] Assessment of the range of mutations that cause DMD shows that the skipping of any exon could be an effective therapy for many different DMD causing mutations in the dystrophin gene. It is estimated that the skipping of only 12 different exons could theoretically correct approximately 75% of DMD causing mutations (van Deutekom J, 2003). Accordingly, in some embodiments, the disclosed method comprises deletion of one or more (e.g., 1, 2, 3, 4, 5, 6, 7, 8, 9, 10, 11 or 12) skippable dystrophin exons selected from the group consisting of exon 2, exon 8, exon 17, exon 43, exon 44, exon 45, exon 46, exon 50, exon 51, exon 52, exon 53, and exon 55. For example, in some embodiments, the disclosed method comprises deletion of one skippable dystrophin exon selected from the group consisting of exon 2, exon 8, exon 17, exon 43, exon 44, exon 45, exon 46, exon 50, exon 51, exon 52, exon 53, and exon 55. In some embodiments, the disclosed method comprises deletion of two skippable dystrophin exons selected from the group consisting of exon 2, exon 8, exon 17, exon 43, exon 44, exon 45, exon 46, exon 50, exon 51, exon 52, exon 53, and exon 55. In some embodiments, the disclosed method comprises deletion of three skippable dystrophin exons selected from the group consisting of exon 2, exon 8, exon 17, exon 43, exon 44, exon 45, exon 46, exon 50, exon 51, exon 52, exon 53, and exon 55. In some embodiments, the disclosed method comprises deletion of more than three skippable dystrophin exons selected from the group consisting of exon 2, exon 8, exon 17, exon 43, exon 44, exon 45, exon 46, exon 50, exon 51, exon 52, exon 53, and exon 55.

[0052] In some embodiments, the skippable exon in the dystrophin gene is selected from the list in Table 1, based on the deleted exon or deleted exons that specifically occur in the dystrophin gene of the subject.

TABLE 1
Therapeutic exon skipping strategies for DMD deletions

| Skippable | |
|---|---|
| Exon | Dystrophin exon deletions |
| exon 2 | 3-7, 3-19, 3-21 |
| exon 8 | 3-7, 4-7, 5-7, 6-7 |
| exon 17 | 12-16, 18-33, 18-41, 18-44 |
| exon 43 | 44, 44-47, 44-49, 44-51 |
| exon 44 | 14-43, 19-43, 30-43, 35-43, 36-43, 40-43, 42-43, 45, 45-54 |
| exon 45 | 12-44, 18-44, 44, 46-47, 46-48, 46-49, 46-51, 46-53, 46-55 |
| exon 46 | 21-45, 45, 47-54, 47-56 |
| exon 50 | 51, 51-53, 51-55 |
| exon 51 | 45-50, 47-50, 48-50, 49-50, 50, 52, 52-63 |
| exon 52 | 51, 53, 53-55 |
| exon 53 | 10-52, 45-52, 46-52, 47-52, 48-52, 49-52, 50-52, 52 |
| exon 55 | 45-54, 48-54 |

[0053] In some embodiments, the present disclosure provides a method of treating a subject (e.g., a human) with Duchenne muscular dystrophy (DMD), wherein the subject has a mutation that causes a frameshift in the dystrophin gene. There are a variety of frameshifting mutations that occur in dystrophin gene which are known to cause DMD. Non-limiting examples of such mutations in the dystrophin gene include a deletion, an insertion, a duplication, or a translocation. The most prevalent cause of DMD is deletions of one or more exons; approximately 60-70% of DMD cases are caused by large deletions (van Deutekom J, 2003). In some embodiments, the subject with DMD (e.g., a human) has one or more of a deletion, an insertion, a duplication, or a translocation in their dystrophin gene. For example, in some embodiments, the subject with DMD (e.g., a human) has a deletion and/or a duplication in the dystrophin gene. In a specific embodiment, the subject with DMD (e.g., a human) has a deletion in their dystrophin gene.

[0054] In some embodiments, the subject with DMD (e.g., a human) has a mutation (e.g., a deletion, an insertion, a duplication, or a translocation) in their dystrophin gene, wherein the mutation is in exons 3-7, 3-19, 3-21, 4-7, 5-7, 6-7, 12-16, 18-33, 18-41, 18-44, 44, 44-47, 44-49, 44-51, 14-43, 19-43, 30-43, 35-43, 36-43, 40-43, 42-43, 45, 45-54, 12-44, 18-44, 46-47, 46-48, 46-49, 46-51, 46-53, 46-55, 21-45, 47-54, 47-56, 51, 51-53, 51-55, 45-50, 47-50, 48-50, 49-50, 50, 52, 52-63, 53, 53-55, 10-52, 45-52, 46-52, 47-52, 48-52, 49-52, 50-52, 45-54, or 48-54. In some embodiments, the subject with DMD (e.g., a human) has a mutation in their dystrophin gene, wherein the mutation is a deletion of exons 3-7, 3-19, 3-21, 4-7, 5-7, 6-7, 12-16, 18-33, 18-41, 18-44, 44, 44-47, 44-49, 44-51, 14-43, 19-43, 30-43, 35-43, 36-43, 40-43, 42-43, 45, 45-54, 12-44, 18-44, 46-47, 46-48, 46-49, 46-51, 46-53, 46-55, 21-45, 47-54, 47-56, 51, 51-53, 51-55, 45-50, 47-50, 48-50, 49-50, 50, 52, 52-63, 53, 53-55, 10-52, 45-52, 46-52, 47-52, 48-52, 49-52, 50-52, 45-54, or 48-54.

[0055] In another aspect, the present disclosure provides a method of treating a subject (e.g., a human) with Duchenne muscular dystrophy (DMD), comprising administering to the subject a composition comprising an adeno-associated viral vector, an RNA-guided nuclease or nickase or a DNA endonuclease, and at least one dystrophin targeted guide RNA in amount sufficient to restore the reading frame of the dystrophin gene in the subject; wherein the dystrophin targeted guide RNA recognizes a target site in the dystrophin gene selected from the sequences identified in Table 2.

[0056] In some embodiments, restoration of the reading frame of the dystrophin gene results in partial or complete restoration of dystrophin protein activity. In some embodiments, restoration of the reading frame of the dystrophin gene results in partial restoration of dystrophin protein activity. For example, in some embodiments, restoration of the reading frame of the dystrophin gene increases the amount of dystrophin protein activity in the subject's cells (e.g., muscle cells). For example, the amount of dystrophin protein activity in the subject's cells (e.g., muscle cells) increases by at least 5%, 10%, 15%, 20%, 25%, 30%, 33%, 35%, 40%, 45%, 50%, 55%, 60%, 70%, 75%, 80%, 85%, 90%, 91%, 92%, 93%, 94%, 95%, 96%, 97%, 98%, 99% or more as compared to the amount of dystrophin protein activity in such cells in a subject before undergoing treatment or in a subject who does not undergo treatment. In some embodiments, restoration of the reading frame of the dystrophin gene results in complete restoration of dystrophin protein activity.

[0057] In some embodiments, the DNA endonuclease is a Cas9 endonuclease, a Cpf1 endonuclease, or a MAD7 endonuclease. For example, in some embodiments, the DNA endonuclease is a Cas9 endonuclease. In another embodiment, the DNA endonuclease is a Cpf1 endonuclease. In another embodiment, the DNA endonuclease is a MAD7 endonuclease.

[0058] In some embodiments, the composition comprises at least one (e.g., 1, 2, 3, 4, 5 or more) dystrophin-targeted guide RNA. In some embodiments, the composition comprises one dystrophin-targeted guide RNA. In some embodiments, the composition comprises two dystrophin-targeted guide RNAs. In some embodiments, the composition comprises more than two dystrophin-targeted guide RNAs. In some embodiments, the dystrophin-targeted guide RNAs recognize different DNA sequences (also referred to as target sites). For example, in some embodiments, the composition comprises two dystrophin-targeted guide RNAs that recognize different target sites. The target site(s) recognized by the at least one dystrophin targeted guide RNA may occur in an intron and/or exon of the dystrophin gene. In some embodiments for example, the target site(s) recognized by the at least one dystrophin targeted guide RNA may occur in an intron of the dystrophin gene. In some embodiments, the composition comprises two dystrophin-targeted guide RNAs that recognize different intronic target sites. In some embodiments, the composition comprises two dystrophin-targeted guide RNAs wherein at least one guide RNA recognizes an intron target site. Non-limiting examples of intronic targets sites within the dystrophin gene are identified in Table 2.

[0059] In yet another aspect, the present disclosure provides a method of treating a subject (e.g., a human) with a genetic disease or disorder, comprising a gene editing strategy comprising administering to the subject a composition comprising an adeno-associated viral vector, an RNA-guided nuclease or nickase or a DNA endonuclease, at least one guide RNA, and optionally a donor DNA template in an amount sufficient to (i) delete a skippable exon encoding a mutated gene, wherein such deletion prevents a frameshift of the mutated gene; and/or (ii) correct the DNA sequence of the mutated gene via homology directed repair (HDR) wherein the mutated gene is associated with the cause of the disease or disorder; and wherein said method of treatment reduces at least one symptom associated with the disease or disorder.

[0060] In some embodiments, the present disclosure provides a method of treating a subject (e.g., a human) with a genetic disease or disorder, comprising a gene editing strategy comprising administering to the subject a composition comprising an adeno-associated viral vector, a DNA endonuclease, at least one guide RNA, and a donor DNA template in an amount sufficient to (i) delete a skippable exon encoding a mutated gene, wherein such deletion prevents a frameshift of the mutated gene; and/or (ii) correct the DNA sequence of the mutated gene via homology directed repair (HDR) wherein the mutated gene is associated with the cause of the disease or disorder; and wherein said method of treatment reduces at least one symptom associated with the disease or disorder. In some embodiments, the present disclosure provides a method of treating a subject (e.g., a human) with a genetic disease or disorder, comprising a gene editing strategy comprising administering to the subject a composition comprising an adeno-associated viral vector, a DNA endonuclease, and at least one guide RNA in an amount sufficient to (i) delete a skippable exon encoding a mutated gene, wherein such deletion prevents a frameshift of the mutated gene; wherein the mutated gene is associated with the cause of the disease or disorder; and wherein said method of treatment reduces at least one symptom associated with the disease or disorder.

[0061] In some embodiments of the foregoing methods of treatment, the DNA endonuclease is a Cas9 endonuclease, a Cpf1 endonuclease, or a MAD7 endonuclease. For example, in some embodiments, the DNA endonuclease is a Cas9 endonuclease. In other embodiments, the DNA endonuclease is a Cpf1 endonuclease. In other embodiments, the DNA endonuclease is a MAD7 endonuclease.

[0062] In some embodiments of the foregoing methods of treatment, the composition comprises at least one (e.g., 1, 2, 3, 4, 5 or more) guide RNA. In some embodiments, the composition comprises one guide RNA. In some embodiments, the composition comprises two guide RNAs. In some embodiments, the composition comprises more than two guide RNAs. In some embodiments, the guide RNAs recognize different DNA sequences (also referred to as target sites). For example, in some embodiments, the composition comprises two guide RNAs that recognize different target sites. The target site(s) recognized by the at least one guide RNA may occur in an intron and/or exon of the mutated gene associated with the cause of the disease or disorder. In some embodiments for example, the target site(s) recognized by the at least one guide RNA may occur in an intron of the mutated gene. In some embodiments, the composition comprises two guide RNAs that recognize different intronic target sites. In some embodiments, the composition comprises two guide RNAs wherein at least one guide RNA recognizes an intron target site. Non-limiting examples of intronic targets sites within the dystrophin gene, which is mutated in DMD for example, are identified in Table 2.

[0063] In some embodiments of the foregoing method of treatment, the composition comprises at least one (e.g., 1, 2, 3, 4, 5 or more) guide RNA that recognizes a target site in a gene selected from the group consisting of MYH7, TNNT2, TPM1, MYBPC3, PRKAG2, TNNI3, MYL3, TNN, MYL2, ACTC1, CSRP3, TNNC1, MYH6, VCL, MYOZ2, JPH2, PLN, CALR3, NEXN, MYPN, ACTN2, LDB3, TCAP, FLNC, SOD1, C90RF72, and RYR. In some embodiments, the composition comprises one guide RNA that recognizes a target site in a gene selected from the group consisting of MYH7, TNNT2, TPM1, MYBPC3, PRKAG2, TNNI3, MYL3, TNN, MYL2, ACTC1, CSRP3, TNNC1, MYH6, VCL, MYOZ2, JPH2, PLN, CALR3, NEXN, MYPN, ACTN2, LDB3, TCAP, FLNC, SOD1, C90RF72, and RYR. In some embodiments, the composition comprises two guide RNAs that recognize a target site in a gene selected from the group consisting of MYH7, TNNT2, TPM1, MYBPC3, PRKAG2, TNNI3, MYL3, TNN, MYL2, ACTC1, CSRP3, TNNC1, MYH6, VCL, MYOZ2, JPH2, PLN, CALR3, NEXN, MYPN, ACTN2, LDB3, TCAP, FLNC, SOD1, C90RF72, and RYR. In some embodiments, the composition comprises more than two guide RNAs that recognize a target site in a gene selected from the group consisting of MYH7, TNNT2, TPM1, MYBPC3, PRKAG2, TNNI3, MYL3, TNN, MYL2, ACTC1, CSRP3, TNNC1, MYH6, VCL, MYOZ2, JPH2, PLN, CALR3, NEXN, MYPN, ACTN2, LDB3, TCAP, FLNC, SOD1, C90RF72, and RYR.

[0064] In some embodiments of the foregoing method of treatment, the composition optionally comprises a donor DNA template to correct the DNA sequence of the mutated gene via a homology directed repair mechanism. When an endonuclease cleaves DNA to effect a double-strand break, such breaks can be repaired by natural, endogenous cellular processes such as homology-directed repair (HDR) and non-homologous end-joining (NHEJ). NHEJ directly joins the DNA ends resulting from a double-strand break without the need for a homologous template. NHEJ is an error-prone repair mechanism that can sometimes result in the loss or addition of nucleotide sequence (small deletions or insertions known as indels), which can disrupt or otherwise alter gene expression. HDR, on the other hand, utilizes a homologous sequence, or donor sequence, as a template for inserting a defined DNA sequence at the break point.

[0065] The donor sequence can be in the endogenous genome, such as a sister chromatid. Alternatively, the donor can be an exogenous nucleic acid, such as a plasmid, a single-strand oligonucleotide, a double-strand oligonucleotide, a duplex oligonucleotide or a virus, that has regions of high homology with the endonuclease-cleaved locus, but which can also contain additional sequence or sequence changes including deletions that can be incorporated into the cleaved target locus. For the purposes of gene editing as described herein, the repair template can be supplied as an exogenous nucleic acid, such as a plasmid, duplex oligonucleotide, single-strand oligonucleotide or viral nucleic acid.

[0066] The donor template may comprise at least a portion of the wild-type sequence of the mutated gene. In this way, a corrected version of the mutated gene can be introduced between the flanking regions of homology so that the corrected nucleic acid sequence becomes incorporated into the target locus. Hence, using the exogenous donor template, HDR results in permanent insertion or correction of a mutated gene, thereby leading to rescued expression and activity of the causative gene, and subsequently, reduction of at least one symptom associated with the disease or disorder. One skilled in the art would appreciate that with other exogenous donor templates, a non-wild-type nucleic acid sequence (such as a transgene) or modification (such as a single or multiple base change or a deletion) can be introduced between the flanking regions of homology so that the additional or altered nucleic acid sequence also becomes incorporated into the target locus. The present disclosure also contemplates such non-wild-type corrections or modifications.

[0067] In some embodiments, the composition optionally comprises a donor DNA template to correct the DNA sequence of the mutated gene via a homology directed repair mechanism. In some embodiments, the donor DNA template is homologous to a gene selected from the group consisting of DMD, MYH7, TNNT2, TPM1, MYBPC3, PRKAG2, TNNI3, MYL3, TNN, MYL2, ACTC1, CSRP3, TNNC1, MYH6, VCL, MYOZ2, JPH2, PLN, CALR3, NEXN, MYPN, ACTN2, LDB3, TCAP, FLNC, SOD1, C90RF72, and RYR. For example, in some embodiments, the donor DNA template is homologous to RYR. In some embodiments, the donor DNA template is homologous to the dystrophin gene (DMD). In some embodiments, the donor DNA template is homologous to DMD and provides a portion of the wild-type DMD sequence. In some embodiments, the donor DNA template comprises at least a part of exon 1, exon 2, exon 3, exon 4, exon 5, exon 6, exon 7, exon 8, exon 9, exon 10, exon 11, exon 12, exon 13, exon 14, exon 15, exon 16, exon 17, exon 18, exon 19, exon 20, exon 21, exon 22, exon 23, exon 24, exon 25, exon 26, exon 27, exon 28, exon 29, exon 30, exon 31, exon 32, exon 33, exon 34, exon 35, exon 36, exon 37, exon 38, exon 39, exon 40, exon 41, exon 42, exon 43, exon 44, exon 45, exon 46, exon 47, exon 48, exon 49, exon 50, exon 51, exon 52, exon 53, exon 54, exon 55, exon 56, exon 57, exon 58, exon 59, exon 60, exon 61, exon 62, exon 63, exon 64, exon 65, exon 66, exon 67, exon 68, exon 69, exon 70, exon 71, exon 72, exon 73, exon 74, exon 75, exon 76, exon 77, exon 78, exon 79, intronic regions, synthetic intronic regions, fragments, combinations thereof, or the entire dystrophin gene.

[0068] In certain embodiments, the present disclosure provides a method of treating a subject (e.g., a human) with a genetic disease or disorder, such as, for example Duchenne muscular dystrophy. In some embodiments, the genetic disease or disorder is a muscle-related disease or disorder selected from the group consisting of Hypertrophic cardiomyopathy (HCM or CMH), amyotrophic lateral sclerosis, Becker's muscular dystrophy, central core disease, centronuclear myopathy (including myotubular myopathy), Charcot-Marie-Tooth disease, congenital muscular dystrophy, congenital myasthenic syndrome, Dejerine-Sottas disease, dermatomyositis, Duchenne muscular dystrophy, Emery-Dreifuss muscular dystrophy, facioscapulohumeral muscular dystrophy, Friedreich's ataxia, hyperthyroid myopathy, hypothyroid myopathy, inclusion body myositis, Lambert-Eaton myasthenic syndrome, Limb-girdle muscular dystrophy, mitochondrial myopathy, myasthenia gravis, myotonia congenita (including Thomsen's disease and Becker disease), nemaline myopathy, paramyotonia congenita, periodic paralysis (including hypokalemic and hyperkalemic), polymyositis, spinal and bulbar muscular atrophy, and spinal muscular atrophy.

[0069] In certain embodiments, the subject to be treated (e.g., a human) has a disease or disorder that is suitable for treatment by an exon skipping therapeutic strategy. As discussed earlier, exon skipping is a strategy in which sections of genes are “skipped” during pre-mRNA splicing, to enlarge a deletion so that it becomes its nearest in-frame counterpart. In the case of DMD, this allows for the creation of a partially deleted but functional dystrophin protein (van Deutekom J, 2003). In certain embodiments, exon skipping is effected by deletion of at least a portion of the targeted exon. For example, in certain embodiments, in DMD exon skipping is effected by deletion of at least a portion of one or more (e.g., 1, 2, 3, 4, 5, 6, 7, 8, 9, 10, 11 or 12) dystrophin exons selected from the group consisting of exon 2, exon 8, exon 17, exon 43, exon 44, exon 45, exon 46, exon 50, exon 51, exon 52, exon 53, and exon 55. In any disease or disorder suitable for treatment by an exon skipping therapeutic strategy, exon skipping would be directed to restoring the reading frame of a mutated gene associated with the cause of the disease or disorder.

[0070] Accordingly, in certain embodiments, the subject to be treated (e.g., a human) has a disease or disorder selected from the group comprising Ataxia-telangiectasia, congenital disorder of glycosylation, fronto-temporal dementia and parkinsonism linked to chromosome 17, Niemann-Pick disease type C, neurofibromatosis type 1, neurofibromatosis type 2, megalencephalic leukoencephalopathy with subcortical cysts type 1, Pelizaeus-Merzbacher disease, familial dysautonomia, Marfan syndrome, and Loeys-Dietz syndrome.

### Endonucleases and RNA-Guided Nucleases

[0071] In some embodiments, the composition administered in a disclosed method of treating subject (e.g., a human) comprises a DNA endonuclease. The DNA endonuclease can be any endonuclease that is capable of cleaving DNA to effect a single or double strand break at the intended locus. For example, the DNA endonuclease can be a MAD1, MAD2, MAD3, MAD4, MAD5, MAD6, MAD7, MAD8, MAD9 MAD10, MAD11, or MAD11 endonuclease (see, e.g., U.S. Pat. No. 9,982,279). The DNA endonuclease can be a Cas1, Cas1 B, Cas2, Cas3, Cas4, Cas5, Cas6, Cas7, Cas8, Cas9 (also known as Csn1 and Csx12), Cas1 OO, Csy1, Csy2, Csy3, Cse1, Cse2, Csc1, Csc2, Csa5, Csn2, Csm2, Csm3, Csm4, Csm5, Csm6, Cmr1, Cmr3, Cmr4, Cmr5, Cmr6, Csb1, Csb2, Csb3, Csx17, Csx14, Csx10, Csx16, CsaX, Csx3, Csx1, Csx15, Csf1, Csf2, Csf3, Csf4, or Cpf1 endonuclease; a homolog thereof, a recombinant of the naturally occurring molecule thereof, a codon-optimized version thereof, a modified version thereof (e.g., a mutated variant such as a nickase), and combinations of any of the foregoing. For example, in some embodiments, the DNA endonuclease is a Cas9 or Cpf1 endonuclease that effects a single-strand break (SSB) or double-strand break (DSB) at a locus within or near the mutated gene (e.g., the dystrophin gene).

[0072] In some embodiments, the DNA endonuclease is a Cas9 endonuclease (e.g., a recombinant Cas9, a codon-optimized Cas9, a modified or mutated Cas9). The Cas9 endonuclease can be derived from a variety of bacterial species. For example, in certain embodiments, the Cas9 endonuclease is derived from Streptococcus thermophiles, Streptococcus pyogenes, Neisseria meningitides, Staphylococcus aureus, or Treponema denticola. In a specific embodiment, the Cas9 endonuclease is derived from Staphylococcus aureus (SaCas9). In another specific embodiment, the Cas9 endonuclease is derived from Streptococcus pyogenes (SpCas9). Wild type Cas9 has two active sites (RuvC and HNH nuclease domains) for cleaving DNA, one for each strand of the double helix. However, nickase variants of Cas9 are readily available (e.g., Addgene, plasmid #. 48873) that are only capable of cleaving one strand of the DNA due to catalytic inactivation of the RuvC or HNH nuclease domains. Accordingly, in a specific embodiment, the Cas9 endonuclease is a mutated SpCas9 endonuclease (e.g., a nickase) and/or a codon-optimized version thereof.

[0073] In other embodiments, the DNA endonuclease is a Cpf1 endonuclease (e.g., a recombinant Cpf1, a codon-optimized Cpf1, a modified or mutated Cpf1). The Cpf1 endonuclease can be derived from a variety of bacterial species. For example, in certain embodiments, the Cpf1 endonuclease is derived from Acidaminococcus bacteria or Lachnospiraceae bacteria. In a specific embodiment, the Cpf1 endonuclease is a Lachnospiraceae bacterium ND2006 Cpf1.

[0074] In other embodiments, the DNA endonuclease is a MAD7 endonuclease (e.g., a recombinant MAD7, a codon-optimized MAD7, a modified or mutated MAD7). MAD7 is a codon optimized endonuclease can be derived from Eubacterium rectale (Inscripta, Boulder, CO.) MAD7 is described in U.S. Pat. No. 9,982,279.

[0075] In other embodiments, an RNA-guided nuclease is used. Exemplary RNA-guided nucleases include Cas13a, Cas 13b and Cas13d.

### Guide RNAs

[0076] In addition to an endonuclease, methods of treatment presently disclosed also comprise a guide RNA to recruit and direct the endonuclease activity to the locus of a mutated gene, such as a gene associated with the cause of the disease or disorder (e.g., the dystrophin gene). In some embodiments, the composition administered in a disclosed method of treating a subject (e.g., a human) comprises at least one (e.g., 1, 2, 3, 4, 5 or more) guide RNA. For example, in certain embodiments of a method of treatment disclosed herein, the composition comprises one dystrophin-targeted guide RNA. In some embodiments of a method of treatment disclosed herein, the composition comprises two dystrophin-targeted guide RNAs. In some embodiments of a method of treatment disclosed herein, the composition comprises more than two dystrophin-targeted guide RNAs.

[0077] A “guide RNA” or “gRNA” is a genome-targeting nucleic acid (e.g., an RNA in this context) that can direct the activities of an associated DNA endonuclease. In the context of a CRISPR/Cas or CRISPR/Cpf1 system, the endonuclease can bind to the guide RNA, which in turn, specifies the site in the target DNA to which the endonuclease is directed. CRISPR sequences in bacteria are expressed in multiple RNAs and are then processed to create guide strands for RNA. A guide RNA can comprise at least a spacer sequence that hybridizes to a target nucleic acid sequence of interest, and a CRISPR repeat sequence. In some CRISPR systems, the gRNA also comprises a second RNA called the tracrRNA sequence. In such cases the CRISPR repeat sequence and tracrRNA sequence hybridize to each other to form a duplex. The RNA duplex can then bind an endonuclease (e.g., Cas9) to form a complex. The genome-targeting nucleic acid can provide target specificity to the complex by virtue of its association with the endonuclease. The genome-targeting nucleic acid thus can direct the activity of the complexed endonuclease.

[0078] Cleavage by the CRISPR system requires complementary base pairing of the guide RNA to a 20-nucleotide DNA sequence and the requisite protospacer-adjacent motif (PAM), a short nucleotide motif found 3′ to the target site. One can, theoretically, target any unique N₂₀-PAM sequence in the genome using CRISPR technology. Currently, the most commonly used Cas9 protein is from S. pyogenes (SpCas9), which recognizes the PAM sequence NGG, and thus, the CRISPR targeting sequence is N₂₀NGG. The degenerate N in the NGG sequence, means that given a unique sequence of 20 nucleotides (N₂₀), Cas9 would cleave N₂₀NAGG, N₂₀TGG, N₂₀CGG, and N₂₀GGG equally which can be an issue for precise targeting of alleles.

[0079] Exemplary Cas9 target sites within the human dystrophin gene that require the NGG PAM are provided in Table 2. Those skilled in the art would appreciate that for each case, the guide RNA directing Cas9 to the specific site is designed to be complementary to the indicated genomic target sequence.

[0080] While PAM sequences for the commonly used S. Pyogenes Cas9 (NGG) are abundant throughout the human genome, they are not always positioned correctly to target particular genes for Cas9-mediated modification. Furthermore, a target sequence may have high homology elsewhere in the genome. These additional sequences (so-called “off-targets”) may be unintentionally altered during attempts to use CRISPR mediated genome engineering on the gene of interest. To circumvent this limitation, the present disclosure also contemplates use of S. Pyogenes Cas9 variants with varying PAM sequence specificities. For example, the SpCas9 VQR variant exhibits a NGAN or NGNG PAM binding specificity; the SpCas9 EQR variant exhibits a NGAG PAM binding specificity; and the SpCas9 VRER variant exhibits a NGCG PAM binding specificity.

[0081] The present disclosure also contemplates the use of Cas9 homologs or other endonuclease alternatives that further broaden the range of targetable sites in the human genome due to alternative PAM binding specificities. For example, contemplated herein are S. thermophiles Cas9 that exhibits a NNAGAAW PAM binding specificity; N. meningitides Cas9 that exhibits a NNNNGATT PAM binding specificity; S. aureus Cas9 that exhibits a NGRRT or NGRRN PAM binding specificity; and T. denticola Cas9 that exhibits a NAAAAC PAM binding specificity. Also contemplated herein is the use of the Cpf1 endonuclease which allows for targeting of genomic regions with low GC or high AT content. Unlike Cas9, Cpf1 recognizes a T-rich PAM (TTTV), creates a staggered, double-stranded DNA cut with a 5′ overhang, and does not require a tracrRNA for function.

[0082] Nickase variants of RNA guided endonucleases, for example Cas9, can be used to increase the specificity of CRISPR-mediated genome editing. Wild type Cas9 is typically guided by a single guide RNA designed to hybridize with a specified ˜20 nucleotide sequence in the target sequence (such as an endogenous genomic locus). However, several mismatches can be tolerated between the guide RNA and the target locus, effectively reducing the length of required homology in the target site to, for example, as little as 13 nt of homology, and thereby resulting in elevated potential for binding and double-strand nucleic acid cleavage by the CRISPR/Cas9 complex elsewhere in the target genome—also known as off-target cleavage. Because nickase variants of Cas9 each only cut one strand, in order to create a double-strand break it is necessary for a pair of nickases to bind in close proximity and on opposite strands of the target nucleic acid, thereby creating a pair of nicks, which is the equivalent of a double-strand break. This requires that two separate guide RNAs—one for each nickase—must bind in close proximity and on opposite strands of the target nucleic acid. This requirement essentially doubles the minimum length of homology needed for the double-strand break to occur, thereby reducing the likelihood that a double-strand cleavage event will occur elsewhere in the genome, where the two guide RNA sites—if they exist—are unlikely to be sufficiently close to each other to enable the double-strand break to form.

[0083] Accordingly, in some embodiments of the methods of treatment presently disclosed, the composition comprises two guide RNAs. In some embodiments of the methods of treatment presently disclosed, the composition comprises an adeno-associated viral vector, a Cas9 nickase, and at least one (e.g., 2) guide RNA. In some embodiments of the methods of treatment presently disclosed, the composition comprises an adeno-associated viral vector, a Cas9 nickase, and two guide RNAs. In some embodiments of the methods of treatment presently disclosed, the composition comprises an adeno-associated viral vector, a Cas9 nickase, at least one (e.g., 2) guide RNA. In some embodiments, the composition may further comprise a donor DNA template. For example, in some embodiments of the methods of treatment presently disclosed, the composition comprises an adeno-associated viral vector, a Cas9 nickase, at least one (e.g., 2) guide RNA, and a donor DNA template.

[0084] Nickases can also be used to promote homology directed repair (HDR) versus the more error-prone non-homologous end joining. HDR can be used to introduce selected changes into target sites in the genome through the use of specific donor sequences that effectively mediate the desired changes. Descriptions of various CRISPR/Cas systems for use in gene editing can be found, e.g., in international patent application publication number WO2013/176772.

### AAV Vectors

[0085] While CRISPR-based targeting of disease mutations has been shown to be effective in vitro and in vivo, through mouse and other animal studies, delivery constraints have proven to be limiting. For example, there is a need for appropriate somatic cell delivery systems capable of directing the components of the CRISPR/Cas9 or CRISPR/Cpf1 systems to dystrophic muscle or satellite cells in vivo. In this regard, the non-pathogenic adeno-associated virus (AAV) delivery system has proven to be safe and effective and has already been advanced in clinical trials for gene therapy. As such, in applications where transient expression of the CRISPR components is suitable, the AAV vector based systems can be used. For example, AAV vectors are frequently used in ocular gene therapy. Several features of AAV make it an attractive choice: the virus is nonpathogenic, it infects both dividing and non-dividing cells, expression can persist for long periods of time, and it is particularly noteworthy for its history of safety, efficacy and a general lack of toxicity in clinical trials. With AAV vectors, high titer and levels of expression have been obtained. This vector can be produced in large quantities in a relatively simple system. Construction of recombinant AAV vectors are described in a number of publications, including U.S. Pat. No. 5,173,414.

[0086] The AAV genome is a 4.7 kb single-stranded DNA molecule that can be modified to carry up to 5.2 kb of recombinant DNA, although pushing this limit may lead to reduced packaging efficiency and deleted inserts. Due to the large size of the gene encoding the commonly used Cas9 protein (4.1 kb) itself, delivery with a gRNA, including promoter, terminator and viral inverted terminal repeat (ITR) sequences necessary for expression through a single viral vector, is sometimes limited by this AAV packaging capacity. Hence, at times, use of AAV vectors in gene therapy may necessitate co-transduction of multiple AAV vectors.

[0087] Techniques to produce AAV particles, in which an AAV genome to be packaged that includes the polynucleotide to be delivered, rep and cap genes, and helper virus functions are provided to a cell are standard in the art. Packaging cells are typically used to form virus particles that are capable of infecting a host cell. Such cells include 293 cells which package adenovirus, and ψ2 cells or PA317 cells, which package retrovirus. Viral vectors used in gene therapy are usually generated by producing a cell line that packages a nucleic acid vector into a viral particle. The vectors typically contain the minimal viral sequences required for packaging and subsequent integration into a host, other viral sequences being replaced by an expression cassette for the polynucleotide(s) to be expressed. The missing viral functions are typically supplied in trans by the packaging cell line. For example, AAV vectors used in gene therapy typically only possess ITR sequences from the AAV genome which are required for packaging and integration into the host genome. Viral DNA is packaged in a cell line, which contains a helper plasmid encoding the other AAV genes, namely rep and cap, but lacking ITR sequences. The cell line may also be infected with adenovirus as a helper. The helper virus promotes replication of the AAV vector and expression of AAV genes from the helper plasmid. The helper plasmid is not packaged in significant amounts due to a lack of ITR sequences.

[0088] The AAV rep and cap genes can be from any AAV serotype for which recombinant virus can be derived, and can be from a different AAV serotype than the AAV genome ITRs, including, but not limited to, AAV serotypes AAV-1, AAV-2, AAV-3, AAV-4, AAV-5, AAV-6, AAV-7, AAV-8, AAV-9. AAV-10, AAV-11, AAV-12, AAV-13 and AAV rh 74. AAV vector serotypes can be matched to target cell types. For example, the following exemplary cell types can be transduced by the indicated AAV serotypes among others: liver—AAV8, AAV3, AAV5, AAV9; skeletal muscle—AAV1, AAV7, AAV6, AAV8, AAV9; central nervous system—AAV5, AAV1, AAV4; photoreceptor cells—AAV5; lung—AAV9; heart—AAV8; pancreas—AAV8; and kidney AAV2. Production of pseudotyped AAV is disclosed in, for example, international patent application publication number WO01/83692.

[0089] In light of the foregoing, methods of treatment disclosed by the present invention may comprise administration of a composition comprising, at least in part, an adeno-associated viral vector (AAV), a DNA endonuclease, a guide RNA, and/or a donor DNA template. In some embodiments, the composition comprises at least one (e.g., 1, 2 or more) AAV vector. In some embodiments, the composition comprises one AAV vector. In some embodiments, the composition comprises two AAV vectors. In some embodiments, the composition comprises more than two AAV vectors.

[0090] In some embodiments, one or more of the non-AAV % components of the composition are packaged into the AAV vector before administering to the subject (e.g., a human). For example, in some embodiments, the DNA endonuclease, the guide RNA(s), and/or the donor DNA template are packaged into the AAV vector. In some embodiments for example, the DNA endonuclease, the guide RNA(s), and/or the donor DNA template are packaged into one AAV vector. In other embodiments, the DNA endonuclease, the guide RNA(s), and/or the donor DNA template are packaged into multiple (e.g., 2) AAV vectors. In general, it has been found that an AAV vector can be a very effective means of delivery of a donor template, though the packaging limits for individual donors is <5 kb. As such, in some embodiments, the DNA endonuclease and guide RNA(s) are packaged into a first AAV vector, and the donor DNA template is packaged into a separate, second AAV vector. In such cases, the methods of treatment contemplated herein may comprise administration of a composition comprising both the first and second AAV vectors.

[0091] The AAV vectors contemplated by the methods of treatment of the present invention can be of any AAV serotype, such as, for example, AAV-1, AAV-2, AAV-3, AAV-4, AAV-5, AA-6, AAV-7, AAV-S, AAV-9, AAV-10, AAV-11, AAV-12, AAV-13 and AAV rh.74. Notably, the AAV9 serotype has been shown to provide robust expression in skeletal muscle, heart and brain, the major tissues affected in DMD patients. Therefore, in some embodiments, methods of treatment disclosed by the present invention may comprise administration of a composition comprising, at least in part, an AAV9 viral vector. For example, in some embodiments, the administered composition may comprise a DNA endonuclease, at least one dystrophin-targeted guide RNA, and an AAV9 viral vector. In some embodiments, the DNA endonuclease and at least one dystrophin-targeted guide RNA are packaged into an AAV9 viral vector before administration to the subject (e.g., a human).

### EXAMPLES

### Example 1: Use of Gene Editing to Skip Exon Skipping

[0092] The present example demonstrates use of CRISPR to delete mutant or out-of-frame exons, thereby allowing splicing between surrounding exons to recreate an in-frame dystrophin protein that lacks the mutations.

[0093] As shown in FIG. 6A, two targeting guide RNAs, hs132637319 (CATTGGCTTTGATTTCCCTAGGG (SEQ ID NO: 15)) and hs132637262 (ACAGTTGCCTAAGAACTGGTGGG (SEQ ID NO: 16)) were designed to delete exon 51 and maintain coding frame, thus bypassing frameshifting mutations on exon 51. As shown below, the entire amplicon is ˜1,450 bp, and the expected deletion from both guide RNAs is ˜630 bp.

Human DMD amplicon
(SEQ ID NO: 17)
GAGAGGTTATGTGGCTTTACCAAGGTCCCAGAGTTCCTAGGGCAGAGAAC
AGGATTGTCTACCAGACATTTTAATTCTAGTACTATGCATCTTAACCATT
ACCATAGGCTGACTTACTCTACAGTGTCCAACACTATTCATATTAAGATT
TATTTAATGACTTTGAAACAGTATTTCATGTCTAAATAGAAAAACTACTA
ACTCGCATTTTTAAGAAAATATTGTATCTTGGTTTTTCTTCACTGCTGGC
CAGTTTACTAACAATCTGAAATAAAAAGAAAAAAATATGATAAACTGCTC
CCAGTATAAAATACAGAGCTAAGACAAGAACGTTTCATTGGCTTTGATTT
CCCTAGGGTCCAGCTTCAAATTAATTTACTTCCTATTCAAGGGAATTTTA
AATCAGAAAGAAGATCTTATCCCATCTTGTTTTGCCTTTGTTTTTTCTTG
AATAAAAAAAAAATAAGTAAAATTTATTTCCCTGGCAAGGTCTGAAAACT
TTTGTTTTCTTTACCACTTCCACAATGTATATGATTGTTACTGAGAAGGC
TTATTTAACTTAAGTTACTTGTCCAGGCATGAGAATGAGCAAAATCGTTT
TTTAAAAAATTGTTAAATGTATATTAATGAAAAGGTTGAATCTTTTCATT
TTCTACCATGTATTGCTAAACAAAGTATCCACATTGTTAGAAAAAGATAT
ATAATGTCATGAATAAGAGTTTGGCTCAAATTGTTACTCTTCAATTAAAT
TTGACTTATTGTTATTGAAATTGGCTCTTTAGCTTGTGTTTCTAATTTTT
CTTTTTCTTCTTTTTTCCTTTTTGCAAAAACCCAAAATATTTTAGCTCCT
ACTCAGACTGTTACTCTGGTGACACAACCTGTGGTTACTAAGGAAACTGC
CATCTCCAAACTAGAAATGCCATCTTCCTTGATGTTGGAGGTACCTGCTC
TGGCAGATTTCAACCGGGCTTGGACAGAACTTACCGACTGGCTTTCTCTG
CTTGATCAAGTTATAAAATCACAGAGGGTGATGGTGGGTGACCTTGAGGA
TATCAACGAGATGATCATCAAGCAGAAGGTATGAGAAAAAATGATAAAAG
TTGGCAGAAGTTTTTCTTTAAAATGAAGATTTTCCACCAATCACTTTACT
CTCCTAGACCATTTCCCACCAGTTCTTAGGCAACTGTTTCTCTCTCAGCA
AACACATTACTCTCACTATTCAGCCTAAGTATAATCAAGGATATAAATTA
ATGCAAATAACAAAAGTAGCCATACATTAAAAAGGAAATATACAAAAAAA
AAAAAAAAAAAAAGCAGAAACCTTACAAGAATAGTTGTCTCAGTTAAATT
TACTAAACAACCTGGTATTTTAAAAATCTATTTTATACCAAATAAGTCAC
TCAACTGAGCTATTTACATTTAAACTGTTTGTTTTGGCACTACGCAG

[0094] As shown in FIG. 6B, a PCR analysis following transfection indicated that use of the CRISPR system resulted in a deleted product of the expected size. PCR primers used were:

Human DMD exon 51 forward primer
(SEQ ID NO: 18)
GAGAGGTTATGTGGCTTTACCA
Human DMD exon 51 reverse primer
(SEQ ID NO: 19)
CTGCGTAGTGCCAAAACAAA

[0095] Sequencing analysis further confirmed the deleted product following targeting (see FIG. 6C).

### Example 2: Use of Gene Editing to Skip Exon Skipping

[0096] This experiment demonstrates the ability to use CRISPR systems to cut the DMD gene at a desired location. Specifically, AAV was used to deliver to mouse N2a cells either (1) Cpf1 and a single guide RNA/crRNA (AAGGCCAAACCTCGGCTTACCTG (SEQ ID NO: 20)) (2) Cfp1 and two guide RNA/crRNA (AAAGAGCAATAAAATGGCTTCAA (SEQ ID NO: 21) and AAGGCCAAACCTCGGCTTACCTG (SEQ ID NO: 22)) or (3) MAD7 and the guide RNA/crRNA AAGGCCAAACCTCGGCTTACC (SEQ ID NO: 23) or TTTAAAGGCCAAACCTCGGCTTACC (SEQ ID NO: 24), which included a PAM sequence.

Cpf1 vector (region cloned between AAV2 ITRs)
was encoded by the following sequence:
(SEQ ID NO: 25)
GCGGCCGCGGTCCGACTAGTTAATTAAAAAAACAGGTAAGCCGAGGTTTG
GCCTTATCTACACTTAGTAGAAATTTTCAGGATGTAGACCGGCCGCCACT
ATAAGGCTCGAAAGAGGAATAAATTTTTCGTTTAGGGTGATTTCCCACAA
AGCACAGCGCGTAATTTGCATGCGCTCTACCCCAGGCTCCTGTGCTAGAC
AAGAAGCCCGCGCATCCGGGCAAGGGATGATGACGTCGTCCTTCAAGAGC
GCCGCCACCATGGCCCCCAAGAAGAAGAGGAAAGTGGGAATCCACGGCGT
GCCTGCCGCCAGCAAGCTGGAGAAGTTTACAAACTGCTACTCCCTGTCTA
AGACCCTGCGCTTCAAGGCCATCCCCGTGGGCAAGACCCAGGAGAACATC
GACAATAAGAGGCTGCTGGTGGAGGACGAGAAGAGAGCCGAGGATTATAA
GGGCGTGAAGAAGCTGCTGGATAGGTACTATCTGTCTTTTATCAACGACG
TGCTGCACAGCATCAAGCTGAAGAATCTGAACAATTACATCAGCCTGTTC
AGGAAGAAGACAAGAACCGAGAAGGAGAATAAGGAGCTGGAGAACCTGGA
GATCAATCTGAGAAAGGAGATCGCCAAGGCCTTCAAGGGCAACGAGGGCT
ACAAGTCCCTGTTTAAGAAGGATATCATCGAGACAATCCTGCCTGAGTTC
CTGGACGATAAGGACGAGATCGCCCTGGTGAACAGCTTCAATGGCTTTAC
CACAGCCTTCACCGGCTTCTTTGATAACAGAGAGAATATGTTTTCCGAGG
AGGCCAAGAGCACATCCATCGCCTTCCGGTGTATCAACGAGAATCTGACC
CGCTACATCTCTAATATGGACATCTTCGAGAAGGTGGACGCCATCTTTGA
TAAGCACGAGGTGCAGGAGATCAAGGAGAAGATCCTGAACAGCGACTATG
ATGTGGAGGATTTCTTTGAGGGCGAGTTCTTTAACTTTGTGCTGACACAG
GAGGGCATCGACGTGTACAATGCCATCATCGGCGGCTTCGTGACCGAGAG
CGGCGAGAAGATCAAGGGCCTGAACGAGTACATCAACCTGTATAATCAGA
AGACCAAGCAGAAGCTGCCTAAGTTTAAGCCACTGTACAAGCAGGTGCTG
AGCGATAGGGAGTCTCTGAGCTTCTACGGCGAGGGCTATACATCCGATGA
GGAGGTGCTGGAGGTGTTTAGAAACACCCTGAACAAGAATTCCGAGATCT
TCAGCTCCATCAAGAAGCTGGAGAAGCTGTTCAAGAATTTTGACGAGTAC
TCTAGCGCCGGCATCTTTGTGAAGAACGGCCCTGCCATCAGCACAATCTC
CAAGGATATCTTCGGCGAGTGGAACGTGATCCGGGACAAGTGGAATGCCG
AGTATGACGATATCCACCTGAAGAAGAAGGCCGTGGTGACCGAGAAGTAC
GAGGACGATAGGAGAAAGTCCTTCAAGAAGATCGGCTCCTTTTCTCTGGA
GCAGCTGCAGGAGTACGCCGACGCCGATCTGTCTGTGGTGGAGAAGCTGA
AGGAGATCATCATCCAGAAGGTGGATGAGATCTACAAGGTGTATGGCTCC
TCTGAGAAGCTGTTCGACGCCGATTTTGTGCTGGAGAAGAGCCTGAAGAA
GAACGACGCCGTGGTGGCCATCATGAAGGACCTGCTGGATTCTGTGAAGA
GCTTCGAGAATTACATCAAGGCCTTCTTTGGCGAGGGCAAGGAGACAAAC
CGGGACGAGTCCTTCTATGGCGATTTTGTGCTGGCCTACGACATCCTGCT
GAAGGTGGACCACATCTACGATGCCATCCGCAATTATGTGACCCAGAAGC
CATACTCTAAGGATAAGTTCAAGCTGTATTTTCAGAACCCCCAGTTCATG
GGCGGCTGGGACAAGGATAAGGAGACAGACTATAGGGCCACCATCCTGAG
ATACGGCTCCAAGTACTATCTGGCCATCATGGATAAGAAGTACGCCAAGT
GCCTGCAGAAGATCGACAAGGACGATGTGAACGGCAATTACGAGAAGATC
AACTATAAGCTGCTGCCCGGCCCTAATAAGATGCTGCCTAAGGTGTTCTT
TTCTAAGAAGTGGATGGCCTACTATAACCCAAGCGAGGACATCCAGAAGA
TCTACAAGAATGGCACATTCAAGAAGGGCGATATGTTTAACCTGAATGAC
TGTCACAAGCTGATCGACTTCTTTAAGGATAGCATCTCCAGGTATCCTAA
GTGGTCCAATGCCTACGATTTCAACTTTTCTGAGACAGAGAAGTATAAGG
ACATCGCCGGCTTTTACAGAGAGGTGGAGGAGCAGGGCTATAAGGTGAGC
TTCGAGTCTGCCAGCAAGAAGGAGGTGGATAAGCTGGTGGAGGAGGGCAA
GCTGTACATGTTCCAGATCTATAACAAGGACTTTTCCGATAAGTCTCACG
GCACACCAAATCTGCACACCATGTACTTCAAGCTGCTGTTTGACGAGAAC
AATCACGGCCAGATCAGGCTGAGCGGAGGAGCAGAGCTGTTCATGAGGAG
GGCCTCCCTGAAGAAGGAGGAGCTGGTGGTGCACCCAGCAAACTCCCCTA
TCGCCAACAAGAATCCAGATAATCCCAAGAAGACCACAACCCTGTCCTAC
GACGTGTATAAGGATAAGAGGTTTTCTGAGGACCAGTACGAGCTGCACAT
CCCAATCGCCATCAATAAGTGCCCCAAGAACATCTTCAAGATCAATACAG
AGGTGAGAGTGCTGCTGAAGCACGACGATAACCCATATGTGATCGGCATC
GATCGGGGCGAGCGCAATCTGCTGTACATCGTGGTGGTGGACGGCAAGGG
CAACATCGTGGAGCAGTATTCCCTGAACGAGATCATCAACAACTTCAACG
GCATCCGGATCAAGACAGATTACCACTCTCTGCTGGACAAGAAGGAGAAG
GAGCGGTTCGAGGCCCGCCAGAACTGGACCTCCATCGAGAATATCAAGGA
GCTGAAGGCCGGCTATATCTCTCAGGTGGTGCACAAGATCTGCGAGCTGG
TGGAGAAGTACGATGCCGTGATCGCCCTGGAGGACCTGAACTCTGGCTTT
AAGAATAGCCGCGTGAAGGTGGAGAAGCAGGTGTATCAGAAGTTCGAGAA
GATGCTGATCGATAAGCTGAACTACATGGTGGACAAGAAGTCTAATCCAT
GTGCAACAGGCGGCGCCCTGAAGGGATATCAGATCACCAATAAGTTCGAG
AGCTTTAAGTCCATGTCTACCCAGAACGGCTTCATCTTTTACATCCCTGC
CTGGCTGACATCCAAGATCGACCCATCTACCGGCTTCGTGAACCTGCTGA
AGACAAAGTATACCAGCATCGCCGATTCCAAGAAGTTCATCAGCTCCTTT
GACCGGATCATGTACGTGCCAGAGGAGGATCTGTTCGAGTTTGCCCTGGA
CTATAAGAACTTCTCTCGCACAGACGCCGATTACATCAAGAAGTGGAAGC
TGTACAGCTATGGCAACAGGATCAGAATCTTCCGGAATCCCAAGAAGAAC
AACGTGTTCGACTGGGAGGAGGTGTGCCTGACCAGCGCCTATAAGGAGCT
GTTCAACAAGTACGGCATCAATTATCAGCAGGGCGATATCCGCGCCCTGC
TGTGCGAGCAGTCCGACAAGGCCTTCTACTCTAGCTTTATGGCCCTGATG
AGCCTGATGCTGCAGATGCGGAATTCCATCACAGGCCGCACCGACGTGGA
TTTTCTGATCAGCCCCGTGAAGAACTCCGACGGCATCTTCTACGATAGCA
GGAACTATGAGGCCCAGGAGAATGCCATCCTGCCTAAGAACGCCGACGCC
AATGGCGCCTATAACATCGCCAGAAAGGTGCTGTGGGCCATCGGCCAGTT
CAAGAAGGCCGAGGACGAGAAGCTGGATAAGGTGAAGATCGCCATCTCTA
ACAAGGAGTGGCTGGAGTACGCCCAGACCAGCGTGAAGCATAAACGACCA
GCCGCAACTAAAAAGGCAGGGCAGGCAAAGAAGAAGAAAGGAAGCTAACC
GGTCAGACATGATAAGATACATTGATGAGTTTGGACAAACCACAACTAGA
ATGCAGTGAAAAAAATGCTTTATTTGTGAAATTTGTGATGCTATTGCTTT
ATTTGTAACCATTATAAGCTGCAATAAACAAGTTAACAACAACAATTGCA
TTCATTTTATGTTTCAGGTTCAGGGGGAGGTGTGGGAGGTTTTTTAAAGC
TAGCGGCCGC
Cpf1 dual vector (region cloned between AAV2 ITRs)
was encoded by the following sequence:
(SEQ ID NO: 26)
GCGGCCGCGGTCCGACTAGTTAATTAAAAAAACAGGTAAGCCGAGGTTTG
GCCTTATCTACACTTAGTAGAAATTTTGAAGCCATTTTATTGCTCTTTAT
CTACACTTAGTAGAAATTTTCAGGATGTAGACCGGCCGCCACTATAAGGC
TCGAAAGAGGAATAAATTTTTCGTTTAGGGTGATTTCCCACAAAGCACAG
CGCGTAATTTGCATGCGCTCTACCCCAGGCTCCTGTGCTAGACAAGAAGC
CCGCGCATCCGGGCAAGGGATGATGACGTCGTCCTTCAAGAGCGCCGCCA
CCATGGCCCCCAAGAAGAAGAGGAAAGTGGGAATCCACGGCGTGCCTGCC
GCCAGCAAGCTGGAGAAGTTTACAAACTGCTACTCCCTGTCTAAGACCCT
GCGCTTCAAGGCCATCCCCGTGGGCAAGACCCAGGAGAACATCGACAATA
AGAGGCTGCTGGTGGAGGACGAGAAGAGAGCCGAGGATTATAAGGGCGTG
AAGAAGCTGCTGGATAGGTACTATCTGTCTTTTATCAACGACGTGCTGCA
CAGCATCAAGCTGAAGAATCTGAACAATTACATCAGCCTGTTCAGGAAGA
AGACAAGAACCGAGAAGGAGAATAAGGAGCTGGAGAACCTGGAGATCAAT
CTGAGAAAGGAGATCGCCAAGGCCTTCAAGGGCAACGAGGGCTACAAGTC
CCTGTTTAAGAAGGATATCATCGAGACAATCCTGCCTGAGTTCCTGGACG
ATAAGGACGAGATCGCCCTGGTGAACAGCTTCAATGGCTTTACCACAGCC
TTCACCGGCTTCTTTGATAACAGAGAGAATATGTTTTCCGAGGAGGCCAA
GAGCACATCCATCGCCTTCCGGTGTATCAACGAGAATCTGACCCGCTACA
TCTCTAATATGGACATCTTCGAGAAGGTGGACGCCATCTTTGATAAGCAC
GAGGTGCAGGAGATCAAGGAGAAGATCCTGAACAGCGACTATGATGTGGA
GGATTTCTTTGAGGGCGAGTTCTTTAACTTTGTGCTGACACAGGAGGGCA
TCGACGTGTACAATGCCATCATCGGCGGCTTCGTGACCGAGAGCGGCGAG
AAGATCAAGGGCCTGAACGAGTACATCAACCTGTATAATCAGAAGACCAA
GCAGAAGCTGCCTAAGTTTAAGCCACTGTACAAGCAGGTGCTGAGCGATA
GGGAGTCTCTGAGCTTCTACGGCGAGGGCTATACATCCGATGAGGAGGTG
CTGGAGGTGTTTAGAAACACCCTGAACAAGAATTCCGAGATCTTCAGCTC
CATCAAGAAGCTGGAGAAGCTGTTCAAGAATTTTGACGAGTACTCTAGCG
CCGGCATCTTTGTGAAGAACGGCCCTGCCATCAGCACAATCTCCAAGGAT
ATCTTCGGCGAGTGGAACGTGATCCGGGACAAGTGGAATGCCGAGTATGA
CGATATCCACCTGAAGAAGAAGGCCGTGGTGACCGAGAAGTACGAGGACG
ATAGGAGAAAGTCCTTCAAGAAGATCGGCTCCTTTTCTCTGGAGCAGCTG
CAGGAGTACGCCGACGCCGATCTGTCTGTGGTGGAGAAGCTGAAGGAGAT
CATCATCCAGAAGGTGGATGAGATCTACAAGGTGTATGGCTCCTCTGAGA
AGCTGTTCGACGCCGATTTTGTGCTGGAGAAGAGCCTGAAGAAGAACGAC
GCCGTGGTGGCCATCATGAAGGACCTGCTGGATTCTGTGAAGAGCTTCGA
GAATTACATCAAGGCCTTCTTTGGCGAGGGCAAGGAGACAAACCGGGACG
AGTCCTTCTATGGCGATTTTGTGCTGGCCTACGACATCCTGCTGAAGGTG
GACCACATCTACGATGCCATCCGCAATTATGTGACCCAGAAGCCATACTC
TAAGGATAAGTTCAAGCTGTATTTTCAGAACCCCCAGTTCATGGGCGGCT
GGGACAAGGATAAGGAGACAGACTATAGGGCCACCATCCTGAGATACGGC
TCCAAGTACTATCTGGCCATCATGGATAAGAAGTACGCCAAGTGCCTGCA
GAAGATCGACAAGGACGATGTGAACGGCAATTACGAGAAGATCAACTATA
AGCTGCTGCCCGGCCCTAATAAGATGCTGCCTAAGGTGTTCTTTTCTAAG
AAGTGGATGGCCTACTATAACCCAAGCGAGGACATCCAGAAGATCTACAA
GAATGGCACATTCAAGAAGGGCGATATGTTTAACCTGAATGACTGTCACA
AGCTGATCGACTTCTTTAAGGATAGCATCTCCAGGTATCCTAAGTGGTCC
AATGCCTACGATTTCAACTTTTCTGAGACAGAGAAGTATAAGGACATCGC
CGGCTTTTACAGAGAGGTGGAGGAGCAGGGCTATAAGGTGAGCTTCGAGT
CTGCCAGCAAGAAGGAGGTGGATAAGCTGGTGGAGGAGGGCAAGCTGTAC
ATGTTCCAGATCTATAACAAGGACTTTTCCGATAAGTCTCACGGCACACC
AAATCTGCACACCATGTACTTCAAGCTGCTGTTTGACGAGAACAATCACG
GCCAGATCAGGCTGAGCGGAGGAGCAGAGCTGTTCATGAGGAGGGCCTCC
CTGAAGAAGGAGGAGCTGGTGGTGCACCCAGCAAACTCCCCTATCGCCAA
CAAGAATCCAGATAATCCCAAGAAGACCACAACCCTGTCCTACGACGTGT
ATAAGGATAAGAGGTTTTCTGAGGACCAGTACGAGCTGCACATCCCAATC
GCCATCAATAAGTGCCCCAAGAACATCTTCAAGATCAATACAGAGGTGAG
AGTGCTGCTGAAGCACGACGATAACCCATATGTGATCGGCATCGATCGGG
GCGAGCGCAATCTGCTGTACATCGTGGTGGTGGACGGCAAGGGCAACATC
GTGGAGCAGTATTCCCTGAACGAGATCATCAACAACTTCAACGGCATCCG
GATCAAGACAGATTACCACTCTCTGCTGGACAAGAAGGAGAAGGAGCGGT
TCGAGGCCCGCCAGAACTGGACCTCCATCGAGAATATCAAGGAGCTGAAG
GCCGGCTATATCTCTCAGGTGGTGCACAAGATCTGCGAGCTGGTGGAGAA
GTACGATGCCGTGATCGCCCTGGAGGACCTGAACTCTGGCTTTAAGAATA
GCCGCGTGAAGGTGGAGAAGCAGGTGTATCAGAAGTTCGAGAAGATGCTG
ATCGATAAGCTGAACTACATGGTGGACAAGAAGTCTAATCCATGTGCAAC
AGGCGGCGCCCTGAAGGGATATCAGATCACCAATAAGTTCGAGAGCTTTA
AGTCCATGTCTACCCAGAACGGCTTCATCTTTTACATCCCTGCCTGGCTG
ACATCCAAGATCGACCCATCTACCGGCTTCGTGAACCTGCTGAAGACAAA
GTATACCAGCATCGCCGATTCCAAGAAGTTCATCAGCTCCTTTGACCGGA
TCATGTACGTGCCAGAGGAGGATCTGTTCGAGTTTGCCCTGGACTATAAG
AACTTCTCTCGCACAGACGCCGATTACATCAAGAAGTGGAAGCTGTACAG
CTATGGCAACAGGATCAGAATCTTCCGGAATCCCAAGAAGAACAACGTGT
TCGACTGGGAGGAGGTGTGCCTGACCAGCGCCTATAAGGAGCTGTTCAAC
AAGTACGGCATCAATTATCAGCAGGGCGATATCCGCGCCCTGCTGTGCGA
GCAGTCCGACAAGGCCTTCTACTCTAGCTTTATGGCCCTGATGAGCCTGA
TGCTGCAGATGCGGAATTCCATCACAGGCCGCACCGACGTGGATTTTCTG
ATCAGCCCCGTGAAGAACTCCGACGGCATCTTCTACGATAGCAGGAACTA
TGAGGCCCAGGAGAATGCCATCCTGCCTAAGAACGCCGACGCCAATGGCG
CCTATAACATCGCCAGAAAGGTGCTGTGGGCCATCGGCCAGTTCAAGAAG
GCCGAGGACGAGAAGCTGGATAAGGTGAAGATCGCCATCTCTAACAAGGA
GTGGCTGGAGTACGCCCAGACCAGCGTGAAGCATAAACGACCAGCCGCAA
CTAAAAAGGCAGGGCAGGCAAAGAAGAAGAAAGGAAGCTAACCGGTCAGA
CATGATAAGATACATTGATGAGTTTGGACAAACCACAACTAGAATGCAGT
GAAAAAAATGCTTTATTTGTGAAATTTGTGATGCTATTGCTTTATTTGTA
ACCATTATAAGCTGCAATAAACAAGTTAACAACAACAATTGCATTCATTT
TATGTTTCAGGTTCAGGGGGAGGTGTGGGAGGTTTTTTAAAGCTAGCGGC
CGC

[0097] As shown in FIGS. 7A-C, an Interference of CRISPR Edits (ICE) analysis was performed indicating cutting of the mouse DMD gene and mutations around the expected site (dotted line) in exon 23 following infection for all three experiments. A discussion of ICE analysis is found at www.synthego.con.

MAD7 vector (region cloned between AAV2 ITRs)
was encoded by the following sequence:
(SEQ ID NO: 28)
GCGGCCGCGGTCCGACTAGTTAATTAAAAAAAGGTAAGCCGAGGTTTGGC
CTTATCTACAAGAGTAGAAATTAAAAAGGTCTTTTGACTTCAGGATGTAG
ACCGGCCGCCACTATAAGGCTCGAAAGAGGAATAAATTTTTCGTTTAGGG
TGATTTCCCACAAAGCACAGCGCGTAATTTGCATGCGCTCTACCCCAGGC
TCCTGTGCTAGACAAGAAGCCCGCGCATCCGGGCAAGGGATGATGACGTC
GTCCTTCAAGAGCGCCGCCACCATGGCACCCAAGAAGAAAAGAAAGGTCG
GAATCCACGGAGTCCCAGCAGCTAACAATGGAACTAACAACTTCCAGAAC
TTCATCGGGATCAGCTCCCTGCAGAAGACCCTGAGGAACGCCCTGATCCC
CACAGAGACAACACAGCAGTTCATCGTGAAGAATGGCATCATCAAGGAGG
ATGAGCTGAGGGGCGAGAACAGACAGATCCTGAAGGACATCATGGACGAT
TACTATAGAGGCTTCATCAGCGAGACACTGTCTAGCATCGACGATATCGA
CTGGACATCCCTGTTTGAGAAGATGGAGATCCAGCTGAAGAATGGCGATA
ACAAGGACACCCTGATCAAGGAGCAGACAGAGTACAGGAAGGCCATCCAC
AAGAAGTTCGCCAATGACGATAGATTCAAGAACATGTTTTCCGCCAAGCT
GATCTCTGACATCCTGCCTGAGTTTGTGATCCACAACAATAACTATAGCG
CCTCCGAGAAGGAGGAGAAGACCCAGGTCATCAAGCTGTTCAGCCGGTTT
GCCACATCCTTCAAGGACTACTTTAAGAATCGCGCCAACTGCTTCAGCGC
CGACGATATCTCCTCTAGCTCCTGTCACCGGATCGTGAATGATAACGCCG
AGATCTTCTTTTCCAACGCCCTGGTGTACAGGAGAATCGTGAAGTCTCTG
AGCAATGACGATATCAACAAGATCTCTGGCGATATGAAGGACTCTCTGAA
GGAGATGAGCCTGGAGGAGATCTACAGCTATGAGAAGTATGGCGAGTTCA
TCACCCAGGAGGGCATCTCTTTTTACAACGACATCTGCGGCAAGGTCAAT
AGCTTCATGAACCTGTATTGTCAGAAGAATAAGGAGAATAAGAACCTGTA
CAAGCTGCAGAAGCTGCACAAGCAGATCCTGTGCATCGCCGATACAAGCT
ATGAGGTGCCATACAAGTTCGAGTCTGACGAGGAGGTGTACCAGAGCGTG
AATGGCTTTCTGGATAACATCTCTAGCAAGCACATCGTGGAGAGGCTGAG
AAAGATCGGCGATAATTATAACGGCTACAACCTGGACAAGATCTACATCG
TGTCCAAGTTCTATGAGTCCGTGTCTCAGAAGACCTATCGCGACTGGGAG
ACAATCAACACAGCCCTGGAGATCCACTACAATAACATCCTGCCCGGCAA
CGGCAAGAGCAAGGCCGATAAGGTGAAGAAGGCCGTGAAGAATGACCTGC
AGAAGTCCATCACCGAGATCAATGAGCTGGTGAGCAACTATAAGCTGTGC
TCCGACGATAACATCAAGGCCGAGACATACATCCACGAGATCAGCCACAT
CCTGAATAACTTCGAGGCCCAGGAGCTGAAGTATAATCCCGAGATCCACC
TGGTGGAGTCCGAGCTGAAGGCCTCTGAGCTGAAGAATGTGCTGGACGTG
ATCATGAACGCCTTCCACTGGTGTTCCGTGTTTATGACCGAGGAGCTGGT
GGACAAGGATAATAACTTTTACGCCGAGCTGGAGGAGATCTATGATGAGA
TCTACCCTGTGATCTCCCTGTACAATCTGGTGCGGAACTATGTGACCCAG
AAGCCTTACTCTACAAAGAAGATCAAGCTGAACTTCGGAATCCCAACCCT
GGCCGACGGATGGAGCAAGTCCAAGGAGTACTCTAATAACGCCATCATCC
TGATGCGCGATAATCTGTACTATCTGGGCATCTTTAATGCCAAGAACAAG
CCTGACAAGAAGATCATCGAGGGCAATACAAGCGAGAACAAGGGCGATTA
TAAGAAGATGATCTACAATCTGCTGCCCGGCCCTAACAAGATGATCCCCA
AGGTGTTCCTGTCCTCTAAGACCGGCGTGGAGACATATAAGCCTAGCGCC
TACATCCTGGAGGGCTATAAGCAGAACAAGCACATCAAGAGCTCCAAGGA
CTTCGATATCACCTTTTGCCACGATCTGATCGACTACTTCAAGAATTGTA
TCGCCATCCACCCAGAGTGGAAGAACTTCGGCTTTGATTTCTCCGACACC
TCTACATATGAGGACATCTCCGGCTTTTACAGGGAGGTGGAGCTGCAGGG
CTATAAGATCGATTGGACATACATCTCTGAGAAGGACATCGATCTGCTGC
AGGAGAAGGGCCAGCTGTACCTGTTCCAGATCTATAACAAGGACTTCAGC
AAGAAGAGCACCGGCAATGACAACCTGCACACAATGTACCTGAAGAATCT
GTTCTCCGAGGAGAACCTGAAGGACATCGTGCTGAAGCTGAATGGCGAGG
CCGAGATCTTCTTTAGAAAGTCTAGCATCAAGAATCCTATCATCCACAAG
AAGGGCTCTATCCTGGTGAACAGGACCTATGAGGCCGAGGAGAAGGACCA
GTTCGGCAACATCCAGATCGTGAGAAAGAATATCCCAGAGAACATCTACC
AGGAGCTGTACAAGTACTTCAACGATAAGAGCGACAAGGAGCTGTCCGAT
GAGGCCGCCAAGCTGAAGAATGTGGTGGGACACCACGAGGCAGCAACCAA
CATCGTGAAGGATTACAGGTACACATACGACAAGTACTTCCTGCACATGC
CAATCACCATCAATTTCAAGGCCAACAAGACAGGCTTTATCAACGACCGC
ATCCTGCAGTATATCGCCAAGGAGAAGGATCTGCACGTGATCGGAATCGA
CCGGGGCGAGCGCAATCTGATCTACGTGTCTGTGATCGACACCTGTGGCA
ACATCGTGGAGCAGAAGAGCTTTAATATCGTGAACGGCTATGATTACCAG
ATCAAGCTGAAGCAGCAGGAGGGAGCAAGGCAGATCGCACGCAAGGAGTG
GAAGGAGATCGGCAAGATCAAGGAGATCAAGGAGGGCTACCTGAGCCTGG
TCATCCACGAGATCTCTAAGATGGTCATCAAGTATAACGCCATCATCGCT
ATGGAGGACCTGAGCTATGGCTTCAAGAAGGGCCGGTTTAAGGTGGAGCG
CCAGGTGTATCAGAAGTTCGAGACAATGCTGATCAATAAGCTGAACTACC
TGGTGTTTAAGGACATCTCCATCACCGAGAACGGCGGCCTGCTGAAGGGC
TATCAGCTGACATACATCCCTGATAAGCTGAAGAATGTGGGCCACCAGTG
CGGCTGTATCTTCTACGTGCCAGCCGCCTATACCTCCAAGATCGACCCCA
CCACAGGCTTTGTGAACATCTTTAAGTTCAAGGATCTGACAGTGGACGCC
AAGCGGGAGTTCATCAAGAAGTTTGATTCTATCCGCTATGACAGCGAGAA
GAACCTGTTTTGCTTCACCTTTGATTACAATAACTTCATCACCCAGAATA
CAGTGATGTCCAAGTCCTCTTGGAGCGTGTACACATACGGCGTGAGGATC
AAGCGGCGCTTCGTGAATGGCAGATTTTCTAACGAGAGCGATACCATCGA
CATCACAAAGGATATGGAGAAGACCCTGGAGATGACAGACATCAACTGGA
GGGATGGCCACGACCTGAGACAGGATATCATCGACTACGAGATCGTGCAG
CACATCTTCGAGATCTTTCGGCTGACCGTGCAGATGCGCAACTCTCTGAG
CGAGCTGGAGGACAGGGATTATGACAGACTGATCTCCCCAGTGCTGAATG
AGAATAACATCTTCTACGATTCTGCCAAGGCAGGCGACGCACTGCCAAAG
GATGCAGACGCAAACGGCGCCTATTGTATCGCCCTGAAGGGCCTGTACGA
GATCAAGCAGATCACAGAGAACTGGAAGGAGGATGGCAAGTTTAGCAGAG
ACAAGCTGAAGATCTCCAATAAGGACTGGTTCGACTTTATTCAGAACAAG
AGGTATCTGCCTAAGAAGAAGAGGAAGGTGTAACCGGTCAGACATGATAA
GATACATTGATGAGTTTGGACAAACCACAACTAGAATGCAGTGAAAAAAA
TGCTTTATTTGTGAAATTTGTGATGCTATTGCTTTATTTGTAACCATTAT
AAGCTGCAATAAACAAGTTAACAACAACAATTGCATTCATTTTATGTTTC
AGGTTCAGGGGGAGGTGTGGGAGGTTTTTTAAAGCTAGCGGCCGC

### EQUIVALENTS

[0098] The present invention is not to be limited in scope by the specific embodiments described which are intended as single illustrations of individual aspects of the invention, and functionally equivalent methods and components are within the scope of the invention. Indeed, various modifications of the invention, in addition to those shown and described herein, will become apparent to those skilled in the art from the foregoing description and accompanying drawings using no more than routine experimentation. Such modifications and equivalents are intended to fall within the scope of the appended claims.

### INCORPORATION BY REFERENCE

[0099] The entire disclosure of each of the patent and scientific documents referred to herein is incorporated by reference for all purposes. The reference van Deutekom J, van Ommen G. Nat Rev Genet. 2003 October; 4(10):774-83 is incorporated herein by reference for all purposes.

TABLE 2
Dystrophin gene intronic target sites

| | | SEQ |
|---|---|---|
| | | ID |
| grID | sequence | NO. |
| hs132692864 | TATGACAAGAGACATCCATGGGG | 29 |
| hs132693671 | AAAATGTGTAAGTAGCACTGTGG | 30 |
| hs132688560 | ATACTTATATTCAAGCACAGGGG | 31 |
| hs132693865 | TAGGAAGATTCTATGCACAGGGG | 32 |
| hs132685714 | AAAGAACCTAAAGTACACAGGGG | 33 |
| hs132684395 | CATGTAGATTAGCCTCACAGGGG | 34 |
| hs132685328 | ATTGAGATTAGAGCAACACGGGG | 35 |
| hs132689934 | TGCAACTAAATATCACACTGTGG | 36 |
| hs132691849 | TCAGATAGTCTACTACCACGTGG | 37 |
| hs132689886 | TGTTATGAACAGATGTTACGTGG | 38 |
| hs132686696 | CGGGTGGGGAAAGAAATATGCGG | 39 |
| hs132690456 | TCCAAACCAGAATAGCACAGTGG | 40 |
| hs132692865 | ATGACAAGAGACATCCATGGGGG | 41 |
| hs132684946 | ACACCCAGATTAAGGCATCGGGG | 42 |
| hs132685812 | GGATCAGGAAGGTCTCACTGTGG | 43 |
| hs132684886 | GAAGATGTCAGGGAACCCTGGGG | 44 |
| hs132687410 | AAGACTATTACAATAAAACGGGG | 45 |
| hs132687348 | AAGATCTGGGAACAACTACGTGG | 46 |
| hs132686482 | ACAGGAATCTGGGAACACTGAGG | 47 |
| hs132687291 | TTTCTACAATCTCATCACTGTGG | 48 |
| hs132692095 | GACCACCCTAAAAATCACCAGGG | 49 |
| hs132686763 | ATGCTTTCTCTAAAACACAGAGG | 50 |
| hs132693151 | TCAATTAGTACAAAGCCATGGGG | 51 |
| hs132687127 | TATCGTACCGATGAACCCTGAGG | 52 |
| hs132683622 | AAATAGACACGATTGCTACGTGG | 53 |
| hs132693659 | GTTTCATGAATAAAGCCCAGAGG | 54 |
| hs132684410 | ACAGACACCCCAAATCCTGGAGG | 55 |
| hs132688945 | GGGTGATTTCAAAGCCACAGAGG | 56 |
| hs132688960 | GCACTTGGCTGGTAATACAGGGG | 57 |
| hs132683504 | TTAGTGGTCAGCTTACAATGAGG | 58 |
| hs132687589 | CTTGACTCAATTCTCCTGAGCGG | 59 |
| hs132693827 | CTTACACATGACCTCCCCAGAGG | 60 |
| hs132692747 | AATCTTAGGAGTAATTACCACGG | 61 |
| hs132693213 | TTGCATTCCAAGAATCACAGTGG | 62 |
| hs132686932 | GTCATCCAAATATATCCCAGGGG | 63 |
| hs132692495 | TGTAACTGGAGACAAGAAGGGGG | 64 |
| hs132690588 | TCAACCAATATGGATCACTGTGG | 65 |
| hs132686172 | CCAAACTGATAAGTCCTCAGGGG | 66 |
| hs132690946 | AATTGTCCAGTAAATCCATGTGG | 67 |
| hs132690397 | ACTGTATAGGAACTACATGGAGG | 68 |
| hs132687602 | AATCATACTGAATATCACTGAGG | 69 |
| hs132683437 | TTTATTTTATTCTCTCTACGGGG | 70 |
| hs132686632 | ACTGGGAAGCTCTTCCACAGTGG | 71 |
| hs132692204 | TAGGGAGGAATCCCACAATGGGG | 72 |
| hs132691458 | AATCCCCTACATTCTCAGGGAGG | 73 |
| hs132688992 | GAAGTGCTTGAAGAGGAACAGGG | 74 |
| hs132688164 | TAAATGAGAGAAGCCCATGGTGG | 75 |
| hs132685798 | CATCATCTCCTACTTCACTGGGG | 76 |
| hs132689462 | CAGACTCTTAAGCAGCAGTGGGG | 77 |
| hs132692750 | GAATGAAAACAAACCCACCGTGG | 78 |
| hs132692262 | CAGACATTCAAAATTCTGGGTGG | 79 |
| hs132688865 | TCTTCTGTGACTATGCAGGGTGG | 80 |
| hs132692640 | AAAGTGAAAGAGCCTCCTCGAGG | 81 |
| hs132688568 | GAGATAAAGAGAAAGATTGGGGG | 82 |
| hs132689902 | GTGTAAAGAACACTACAACACGG | 83 |
| hs132684145 | TGACTAAACACTGAGCCATGAGG | 84 |
| hs132683758 | TCTATTGGCAATGTACACTGAGG | 85 |
| hs132684428 | CAGAGATGTGACATCCAATGTGG | 86 |
| hs132690386 | ATAATAGACATGAAACAACAAGG | 87 |
| hs132687217 | ATAAGCGGGTAGCAGTCCTGCGG | 88 |
| hs132689080 | ATAAATATGATGATCCCAGGAGG | 89 |
| hs132690427 | CTACAGGACTCAGATCTGGGAGG | 90 |
| hs132685282 | TCTAGGCTAGAGTAAAGCTGTGG | 91 |
| hs132692268 | AATTGCGTATGGCTTCATGTGGG | 92 |
| hs132684093 | GATCAAGATCAAGACCGGTGTGG | 93 |
| hs132691237 | TCACCACAGCAACCCCAGGGAGG | 94 |
| hs132684573 | AGTATGTGACGTCAATTGAGTGG | 95 |
| hs132689458 | AGCAGTCCTCAGTAACTCAGGGG | 96 |
| hs132690552 | ACTCTGGGACATGAATCTAGAGG | 97 |
| hs132687556 | CTGTTACCAGTACAGTACAGTGG | 98 |
| hs132684205 | CCTGGGAAGTCAATGTACAGTGG | 99 |
| hs132692233 | TGTGTGTTAGGCCTGGACTGAGG | 100 |
| hs132684753 | ATGTTAAGCCCTCAGCATCGAGG | 101 |
| hs132686955 | GTAAGAGAAAAGTACCAACAGGG | 102 |
| hs132685684 | CATTTCTTGAGAAATCCTTGGGG | 103 |
| hs132691062 | AGAACAATAACACTACCACCCGG | 104 |
| hs132692511 | ACTGTGGTTTAAATGCAGTGAGG | 105 |
| hs132687555 | TTACCAGTACAGTACAGTGGTGG | 106 |
| hs132688050 | TAGAGCTGTGTGAATCCATGGGG | 107 |
| hs132691218 | CGATTAGGTCACAACCAATGGGG | 108 |
| hs132685069 | AGTGGACTTAGGAAGGTACAGGG | 109 |
| hs132692859 | GTGGAAATAATGGTAGATGTGGG | 110 |
| hs132693083 | TCCAAACAGACAGAAATAGGTGG | 111 |
| hs132687780 | ATATCTACTGTGAAATACTGTGG | 112 |
| hs132688699 | GGGTACCTGAGGGATCTGTGAGG | 113 |
| hs132684794 | GAGGTATTGAAGGAATCCAGCGG | 114 |
| hs132688163 | TCTTAAATGAGAGAAGCCCATGG | 115 |
| hs132689423 | AACAGTATTAGAGAAAACCAGGG | 116 |
| hs132689321 | GTGCCATAGAGCACTCTTGGGGG | 117 |
| hs132686643 | CTTGGCTGGATATCGAACAGTGG | 118 |
| hs132693602 | TTCATACACACTCATCATGGGGG | 119 |
| hs132692513 | TGTGGTTTAAATGCAGTGAGGGG | 120 |
| hs132686383 | GTATAACAAAGAAATAACCGTGG | 121 |
| hs132691243 | CAGGGTCAACAAGCTAACAGTGG | 122 |
| hs132691844 | ACCACAAACAGCACTCCACGTGG | 123 |
| hs132684425 | GACATCCAATGTGGTCTGTGGGG | 124 |
| hs132687714 | TGTGTGCAAAGGTAACAAAGAGG | 125 |
| hs132683904 | AAATGGCCCTATGCAGACAAGGG | 126 |
| hs132689023 | TTAGTAACAACCTAGTAACACGG | 127 |
| hs132691952 | GGATCAGAATTGAAACTGAGGGG | 128 |
| hs132692000 | GATGAATTCAACACACCCGGAGG | 129 |
| hs132692165 | ATGAATAGTGACCATGTGAGTGG | 130 |
| hs132693130 | GGTTGAGTGTTTATGCACAGAGG | 131 |
| hs132692978 | GCAAGAAAGATACAGTCTAGGGG | 132 |
| hs132693153 | ACTCTGTCTCTGTAATACTGAGG | 133 |
| hs132686520 | TAAGCCACAAGTGTAATGGGGGG | 134 |
| hs132687319 | AAAGCTTAAAGCTAACGGAGGGG | 135 |
| hs132694337 | GAATACGTAATTGAAAACCATGG | 136 |
| hs132693324 | GGGTAACAAAGTTAAAACCAAGG | 137 |
| hs132693986 | GTACATAAACTACCAATGGGAGG | 138 |
| hs132692198 | GTTGAAACCACATGTTGTGGAGG | 139 |
| hs132694406 | CTTCAGGTAGATGATGACAGGGG | 140 |
| hs132684128 | ACTACTTGAACACACCGCAGTGG | 141 |
| hs132684041 | TGGGACCCGCCTGTTCAGAGGGG | 142 |
| hs132693428 | AGACCCTACACTATGCAAGTGGG | 143 |
| hs132688850 | GATTGAGGGTAGAATGACAAGGG | 144 |
| hs132687303 | ACACTCACTCAATATCATAGGGG | 145 |
| hs132685186 | GAATGGCATAGAGCCCCCAACGG | 146 |
| hs132693008 | TGCTACCTATATATTCCCAGTGG | 147 |
| hs132689334 | AATGAGATAGGGATTCAACAAGG | 148 |
| hs132684482 | ATTTGGGTCAAAGAGAAGGGAGG | 149 |
| hs132688126 | TGGTCTTGTAGACTTACCCGAGG | 150 |
| hs132689750 | ATTGTGGCCAGCTCCCAGGGTGG | 151 |
| hs132688301 | TTTCAGCTAGAAATGAGCTGTGG | 152 |
| hs132690707 | ATGGTCATCCCATAGTACCAAGG | 153 |
| hs132694325 | TTATGAATGATATTCAACCACGG | 154 |
| hs132688352 | GCACTGCAGAGTTCCAGCAGAGG | 155 |
| hs132692070 | AGCTATAAGTGATTTAACAGGGG | 156 |
| hs132684543 | TATGGCAAACTAAAGAAAGGGGG | 157 |
| hs132684790 | GGACTTTGATGAGGACCATGCGG | 158 |
| hs132683980 | CACAAAGTTTGAACACATCGAGG | 159 |
| hs132688744 | CGGATGCTGGCCATAAACAGGGG | 160 |
| hs132687704 | AATTTGAAGAATAAGAACAGAGG | 161 |
| hs132692582 | TTGAGATACCAAAATAAACAGGG | 162 |
| hs132689530 | ACGAAAGCATGGTAGTTTGGGGG | 163 |
| hs132685501 | ATATAGTAAGAAACCCTGAGAGG | 164 |
| hs132692090 | TTATCCTAAAGCAATAGACAAGG | 165 |
| hs132685057 | TCAGCCGGGGAGCAAAACCAGGG | 166 |
| hs132691045 | AGAATGATCTGTAATCTCTGAGG | 167 |
| hs132689993 | AGAATTGCATAGTTATGACAAGG | 168 |
| hs132688078 | AAAACAGCATTGGTTCCAAGTGG | 169 |
| hs132691850 | AATCTAGGCAGCTATTCCAGGGG | 170 |
| hs132688469 | AAATAAGTAGTAAACAAAGGGGG | 171 |
| hs132687269 | ACCTTACAGTGCAAGCAGGGAGG | 172 |
| hs132689948 | AGATGATTACAAACAAACCAGGG | 173 |
| hs132690630 | TCACTACCAGGACCTTAGTGAGG | 174 |
| hs132690861 | ATAGCTATTAGGTCTATGTGAGG | 175 |
| hs132689879 | GTGGTGAGCAAGAACAGTTGAGG | 176 |
| hs132685189 | CCAACGGTACCAGCAATGTGGGG | 177 |
| hs132686308 | ATTTCAAACAGAAACCAGCAGGG | 178 |
| hs132684147 | TAAACACTGAGCCATGAGGTGGG | 179 |
| hs132686359 | TTGTCAATGGGTATGATACGTGG | 180 |
| hs132688977 | GGCTGGCTTGAAAATCAGGAGGG | 181 |
| hs132694162 | TCTCTATGGTAACAGACACAAGG | 182 |
| hs132691795 | TGACTGTTTAGGAGACACACAGG | 183 |
| hs132689131 | ATAACAGCAAGGGATAGGGAAGG | 184 |
| hs132685567 | CCATATTTTATAGAGAACAGTGG | 185 |
| hs132692790 | ATTCAATCACCTATACAATGTGG | 186 |
| hs132684558 | GGAAGATTGAGTGAATACACTGG | 187 |
| hs132686958 | ATGGGGTATGGTAAACCTGGAGG | 188 |
| hs132688973 | TTTCGCATAGACATCTGAGGAGG | 189 |
| hs132691044 | GGAGGCCTTATCAAACACCAGGG | 190 |
| hs132690439 | CCTGGAATTTGAAATATCCGGGG | 191 |
| hs132690818 | AAAACCTCAGTATGAAAACGGGG | 192 |
| hs132685239 | AAGTGATTGAAGGATGACAAAGG | 193 |
| hs132689450 | GGTAACCACAAAGTACCAGAGGG | 194 |
| hs132690736 | GAAGCCTGATGGAGATTAGGTGG | 195 |
| hs132683748 | TTGCTAATACTGATGACAAGTGG | 196 |
| hs132686015 | GATGTGGTATAAAAATTGTGAGG | 197 |
| hs132686527 | ACGAAAGGCATTATGGTAGGGGG | 198 |
| hs132693160 | TGATCCCTGAAATCCAGCAGTGG | 199 |
| hs132691006 | GGAGATGGCGCTAATCTGGGAGG | 200 |
| hs132689365 | TCTAGGGTGAAATTACACGCTGG | 201 |
| hs132694134 | ACAAGAACTAAATTTGCCAGGGG | 202 |
| hs132688730 | AAGGAAATAAAAGTATGGCGGGG | 203 |
| hs132689567 | TGATATCCAGCATAGATGGGGGG | 204 |
| hs132691976 | TCTACATTATGGAAACTCAGAGG | 205 |
| hs132686756 | TGAAGAGATAAAAACAAGCGGGG | 206 |
| hs132692645 | GAAAGCCATTCACCTCGAGGAGG | 207 |
| hs132692330 | AGGCCCTCAAATCTTCCTGGAGG | 208 |
| hs132689399 | GAAAACTTAGGAATTTACTGTGG | 209 |
| hs132685959 | ATTTTCCTAGCATATCTCTGAGG | 210 |
| hs132693504 | ATAATTGAGAATTAGTGCAGGGG | 211 |
| hs132694402 | CAGGGGGAAAAAAATCTTCGGGG | 212 |
| hs132687478 | GGAGAAAAAAGTACTCACAAGGG | 213 |
| hs132693775 | GCTTATATTAGCCAAAGCAGAGG | 214 |
| hs132686630 | AGCATGCTTCTTCACCACTGTGG | 215 |
| hs132685298 | ACACATAGATAGAACTCACACGG | 216 |
| hs132685330 | AAATTGAGATTAGAGCAACACGG | 217 |
| hs132689117 | GAACATGGCAGTTATAACACAGG | 218 |
| hs132687798 | ATATCAGGGCTATTGAGCAGGGG | 219 |
| hs132686189 | CCCCCAGTTAAAATGAACAGTGG | 220 |
| hs132689000 | TATTTATTGTTCCGACTCAGGGG | 221 |
| hs132690232 | AGTTACTCTCCCATTCGAAGGGG | 222 |
| hs132687956 | CATTGCTGTAACACAGACAAGGG | 223 |
| hs132689272 | TCTGGATCAGCATTCAACAAAGG | 224 |
| hs132691446 | AGTCCTCCCTGAGAATGTAGGGG | 225 |
| hs132687104 | TGTGACGACGATCATTGGTGGGG | 226 |
| hs132685245 | TACTCGATCCTACAAGTGCGTGG | 227 |
| hs132687374 | AGATGATGAAGTTTGGACAATGG | 228 |
| hs132693650 | GCCACAGGGACAGAAGTAAGCGG | 229 |
| hs132687494 | TAATAGCAAAGAGGTAAACGTGG | 230 |
| hs132684350 | TAAACAACCCTAAGGCAGTGAGG | 231 |
| hs132690753 | GTAAAAAAATAATTCTAACAGGG | 232 |
| hs132690298 | CAACACATCTCTTCATACAGAGG | 233 |
| hs132694401 | AATTGCATATAACTAATCTGGGG | 234 |
| hs132691551 | ATATAGTTCTTATAATAGTGGGG | 235 |
| hs132686150 | ATACCAAGTATGGTAACACATGG | 236 |
| hs132687025 | AATGAAATAAGTATAGAACATGG | 237 |
| hs132685246 | ACGCACTTGTAGGATCGAGTAGG | 238 |
| hs132685880 | AGCAAGGAGTAGATACAGGGAGG | 239 |
| hs132690686 | AGGGAGCATATAATACACAAAGG | 240 |
| hs132690438 | CTGGAATTTGAAATATCCGGGGG | 241 |
| hs132684212 | GCAGCAGTAACAAACGAACAGGG | 242 |
| hs132683807 | AAATAGTGCCCAATCCTAGGTGG | 243 |
| hs132689451 | TGGTAACCACAAAGTACCAGAGG | 244 |
| hs132690159 | GTTCCCATTAGTGAGGAATGGGG | 245 |
| hs132684260 | TTGCAGATTTAGATTAACTGGGG | 246 |
| hs132685059 | TATGTTCTGTACATCAGCCGGGG | 247 |
| hs132690276 | AGTCCTGCTATAGTCCTAGGAGG | 248 |
| hs132694068 | ATGACAACTGGAAACGTAGGTGG | 249 |
| hs132690916 | AAAATAGTATGAGCATGCAACGG | 250 |
| hs132687720 | AAAAACAAAACATATCACAAAGG | 251 |
| hs132688858 | TGACAATCATGGGAACGACAAGG | 252 |
| hs132688159 | TGCCAACCTGAAGAACGTGAGGG | 253 |
| hs132684399 | GATAAGCAGCTAACATGTGTCGG | 254 |
| hs132692272 | ATAATGTGAAGTAATATGCATGG | 255 |
| hs132686899 | TGTCTAAATTACTATTCACAAGG | 256 |
| hs132690382 | AAGGATTTAAAAATGGACTGTGG | 257 |
| hs132690474 | ACTTTTGATTGAATCCCAAGGGG | 258 |
| hs132692457 | CAGCCTCTGAGCCCTCAAGGTGG | 259 |
| hs132689320 | TGTGCCATAGAGCACTCTTGGGG | 260 |
| hs132687089 | GTGTCCTTGAAGGTGCATTGTGG | 261 |
| hs132684229 | GGTTCAGTGAAACCTTCGTGAGG | 262 |
| hs132689969 | AATAGTGCTATGCACACACAAGG | 263 |
| hs132689815 | CAATAAGTAAGCTTGTGAAGGGG | 264 |
| hs132686337 | AAAACAACGACGAAGTGGGGAGG | 265 |
| hs132688196 | CCTATTCTGAGCATGCCCAGTGG | 266 |
| hs132687490 | GTAAACGTGGCAGAAAGCAGGGG | 267 |
| hs132684310 | GCATATAAAGCAGACCCAAGAGG | 268 |
| hs132693134 | ATATAAAAGAGAATTTAGTGAGG | 269 |
| hs132692661 | AGGCCATTGAACAATTTGAGGGG | 270 |
| hs132686776 | GATATGATTCCTTCACCATGAGG | 271 |
| hs132685390 | GTATAATATCAAAAAGATGGGGG | 272 |
| hs132687439 | TATGGGTAAATATAAGAACATGG | 273 |
| hs132690966 | AACTCTCTGATGGAGTTGTGGGG | 274 |
| hs132691824 | GCGAAGCCACTACCCATGGGGGG | 275 |
| hs132688464 | ATATGTACTGAAAGCAACTGCGG | 276 |
| hs132690082 | AAGAAATGTTGGCTTGTAGGTGG | 277 |
| hs132686839 | ACAACGCATAAAGAGAACACAGG | 278 |
| hs132691575 | AATCTAAGTGGAAGTCCAAGGGG | 279 |
| hs132688947 | CCTTGTAGTTATCCCACATGGGG | 280 |
| hs132690881 | GGGTGACGTGCATATGTGCGTGG | 281 |
| hs132687149 | AGACATTTAATATATGCCCAGGG | 282 |
| hs132693609 | TAGGAGTTCAGAGCATGGTGAGG | 283 |
| hs132689128 | GATGTGGTGGATAACAGCAAGGG | 284 |
| hs132685420 | AAGATGGCGAATATTGACAAGGG | 285 |
| hs132691757 | AGATCCGAACAAACCATCAGCGG | 286 |
| hs132690960 | TAAGGGTGAGTAGTAACAGGAGG | 287 |
| hs132691924 | TCTAATCTCTGTAAGCCAAGTGG | 288 |
| hs132684712 | GCATCAATAGCTAATTCTAGGGG | 289 |
| hs132694065 | TACACCTGAAGGTAAATGGATGG | 290 |
| hs132692819 | TCTTCAGCTATGACCAGACGTGG | 291 |
| hs132691763 | ATAACAGCCAGAGTAATACCAGG | 292 |
| hs132684364 | AGTGAGAGCTAGAAGCCGTGTGG | 293 |
| hs132691725 | CATTGTGTAAAACAATATAGCGG | 294 |
| hs132692184 | TTGGTTGGTATTGATCAGAGAGG | 295 |
| hs132691556 | ACAAGATTGAGGAACAAAGGTGG | 296 |
| hs132686549 | TTAGAACCAAAAGTCGATGGAGG | 297 |
| hs132692419 | ATGTAATCTACGAATCATTGGGG | 298 |
| hs132693290 | CAATTTGTCAAAGCTGACTGGGG | 299 |
| hs132683441 | AGGGGTTAAAGATTACTGAGAGG | 300 |
| hs132687739 | TCTATGATGAAGGAAATGGTGGG | 301 |
| hs132684551 | TAGGATGTGATATCTGGCAGTGG | 302 |
| hs132689071 | AGAAACTTAACAGAAAAAGGAGG | 303 |
| hs132690425 | CCAGATCTGAGTCCTGTAGGGGG | 304 |
| hs132692748 | CTTAGGAGTAATTACCACGGTGG | 305 |
| hs132693208 | CCAAAGTTGGGCAAAGACTGGGG | 306 |
| hs132683725 | ACTTCCGTATTTGGTGAACAGGG | 307 |
| hs132692569 | TACAGGCCATGGGAATGATGGGG | 308 |
| hs132688774 | TGGGAGAGATTACACTCCCGTGG | 309 |
| hs132686587 | ATTAGTCATGGAGTCCTAAGGGG | 310 |
| hs132689161 | AGCTAAGCCACTGATTACTGTGG | 311 |
| hs132693190 | GATAATAGCTGAACATTACGTGG | 312 |
| hs132688165 | GCTTCATCAGAAACCTAGTGTGG | 313 |
| hs132690726 | TGAAGACTTTCGTCTCAGAGAGG | 314 |
| hs132687321 | GAAAAGCTTAAAGCTAACGGAGG | 315 |
| hs132686543 | AGCCGTTAGAGAAAGTGTTGTGG | 316 |
| hs132686677 | GAGGGTGAGGAAACTCACACGGG | 317 |
| hs132687746 | GGTAAGAGTTAGTTACACATGGG | 318 |
| hs132685845 | AATTACGGTGCTACAAGACGAGG | 319 |
| hs132684266 | GAGCTTCCACTAGGCCAGAGGGG | 320 |
| hs132684724 | CCTAGAATTGACGTTACAGGAGG | 321 |
| hs132692162 | ATGGAATGCAGTGTTCAGAGTGG | 322 |
| hs132690034 | GGAACAACAGGAAGGATTAGGGG | 323 |
| hs132694069 | AGGATGACAACTGGAAACGTAGG | 324 |
| hs132690361 | TTTCCACAAAGTTTTCCCAGTGG | 325 |
| hs132690142 | TGGTTGTGTCAACGAAGAGGAGG | 326 |
| hs132693649 | ATGTTGGAGCAATAGCCACAGGG | 327 |
| hs132693054 | GCTAGAAGTAGAAAAGCAGGAGG | 328 |
| hs132685703 | AAACGAATATTGGCGCCATGAGG | 329 |
| hs132684324 | TGATATGCTAAATAAAAGGGGGG | 330 |
| hs132692298 | AAATAAGGTGGGATCCAAGGTGG | 331 |
| hs132685844 | TACGGTGCTACAAGACGAGGAGG | 332 |
| hs132690766 | ATTGCGGTGCCTAAAGCTCGAGG | 333 |
| hs132685660 | AAGTTTCCTCCCTAGAGGAGGGG | 334 |
| hs132687767 | CATCCAAATACCCCTCATAGGGG | 335 |
| hs132692237 | GTCCAGAACATGTTACAACAGGG | 336 |
| hs132690048 | CCATGAAATGCACACCTGGGTGG | 337 |
| hs132693576 | GCCAATTATCTAATTCTCAGGGG | 338 |
| hs132690254 | CTATTAGTTAGACTTCCTTGGGG | 339 |
| hs132692646 | CTGGAAAGCCATTCACCTCGAGG | 340 |
| hs132690892 | ATATGCAAATCAGTATGGAGTGG | 341 |
| hs132691225 | ATACAGTACTAAACAGCCTGAGG | 342 |
| hs132690776 | GAGTAAGTATATTCATTGTGGGG | 343 |
| hs132693450 | GCTCAATCTACTAAGTAACCAGG | 344 |
| hs132687944 | AGCTTGTTGAGAGCCACACACGG | 345 |
| hs132690132 | ACATGGGCATATCAACAATGAGG | 346 |
| hs132689141 | TCAAAAGCAGGATCTTACAAAGG | 347 |
| hs132685645 | CCTCAATTAGAAAAATGCAGAGG | 348 |
| hs132690065 | GGTGTGTACACCTAATCCAAAGG | 349 |
| hs132684631 | ATAAACATGTGGTAGTGGTGAGG | 350 |
| hs132691280 | AATGCTTGTAATGGATGTGACGG | 351 |
| hs132687333 | CAAAACCCATCAACTATAGGCGG | 352 |
| hs132687477 | GAAAAAAGTACTCACAAGGGAGG | 353 |
| hs132692353 | GTTTATGCTCTCCCGCACAATGG | 354 |
| hs132694289 | TGGATTGGACAGACGCTAGGTGG | 355 |
| hs132692756 | AGATTGTTACGGAAGTTTTGGGG | 356 |
| hs132692863 | GTATGACAAGAGACATCCATGGG | 357 |
| hs132690943 | GTGACAAGCTTAGCGAACAGTGG | 358 |
| hs132694217 | TAGTACTTAAGTAGTATGGGTGG | 359 |
| hs132686953 | TTTCTCTTACACATTCTATGGGG | 360 |
| hs132693559 | CCTTTACTGAAATCAGACAAGGG | 361 |
| hs132684360 | CCTACCAAGAGAAGAAGAGGGGG | 362 |
| hs132689568 | GTGATATCCAGCATAGATGGGGG | 363 |
| hs132688082 | TAAATAAATATACTAACCAGTGG | 364 |
| hs132690533 | TGGTGCTTTAGACATTACCCAGG | 365 |
| hs132685901 | TCAAGCAACACTCACACGGGTGG | 366 |
| hs132688101 | AGTGCATACTCTAGTAGTGACGG | 367 |
| hs132691956 | ACGAAGGAGAAAATTCTTTGGGG | 368 |
| hs132684538 | AGAACTGGTAAACAACTGCAGGG | 369 |
| hs132687785 | ACAAACCAGGAAAAATGAGAGGG | 370 |
| hs132694405 | TTCAGGTAGATGATGACAGGGGG | 371 |
| hs132690112 | AGTCTTAGCCAAAAGCAGAGTGG | 372 |
| hs132686174 | TCACTTTTAGTGTTCCCCTGAGG | 373 |
| hs132689675 | TGATTACATTAGCTTCAGAGTGG | 374 |
| hs132686553 | GGAAAAAGATTCCAGAAAGGGGG | 375 |
| hs132690077 | ACGGGAAGCTCAGACAGCTGGGG | 376 |
| hs132692946 | GTGCCTATCCTAATAAGCAGGGG | 377 |
| hs132687052 | TACTAAGTGAATGGAAATGGAGG | 378 |
| hs132684124 | TCCATTATTTTTGACCACTGCGG | 379 |
| hs132690009 | GCAATATGGGAGGAAATTAGGGG | 380 |
| hs132693092 | AATTTTAAAAAGTTTCACAAGGG | 381 |
| hs132688933 | AATCCTTCTGATACAGAAGGTGG | 382 |
| hs132683301 | GAATAAATACTGTTATTCAGAGG | 383 |
| hs132693475 | GTAGATATATACATAAATGGGGG | 384 |
| hs132692372 | TAATTATGTGTCAACACCTGAGG | 385 |
| hs132694152 | CACTGAAGACTATAAAACTGAGG | 386 |
| hs132693536 | CATAATTCTCAAAAAGAGGGGGG | 387 |
| hs132688605 | CATTGATGATGCCTTGAGTGTGG | 388 |
| hs132694275 | TGGGATTTGAAGACTTCACGTGG | 389 |
| hs132687902 | ACAAGGGCAGTGATAAGGAGAGG | 390 |
| hs132694302 | ACTATGGTAACAAGAGAGTGAGG | 391 |
| hs132692001 | ATGAATTCAACACACCCGGAGGG | 392 |
| hs132684000 | ATTCTCAAGTGCAGTCACCAGGG | 393 |
| hs132691315 | ATTTATGGCATAATTACCAGAGG | 394 |
| hs132683560 | GCAGTATGATGAAGTGCAGGGGG | 395 |
| hs132685408 | TGTCTATTAAGCATCAACCTAGG | 396 |
| hs132691318 | TATAGCTGTATCATTTACTGAGG | 397 |
| hs132688107 | GTTACATTTAACCTTCACCATGG | 398 |
| hs132686513 | AGTTTTCTACCATAGACAAGGGG | 399 |
| hs132690064 | CTGACAGCCCATTAGAGACGGGG | 400 |
| hs132690041 | AATGGCACCATTATCCACCCAGG | 401 |
| hs132692217 | AATTCTTTCCCAGAACAATGTGG | 402 |
| hs132683561 | AGCAGTATGATGAAGTGCAGGGG | 403 |
| hs132686456 | TAAACTGCAGACACTTCCACGGG | 404 |
| hs132684593 | TAAAAAATGAGAGATAGGTGGGG | 405 |
| hs132692125 | ACACTTGAGAAGAAACTAGACGG | 406 |
| hs132693874 | GATGGAGTCAACATTTCCAAAGG | 407 |
| hs132692624 | ATAAATATCCTTGATGCCTGTGG | 408 |
| hs132688604 | GTGGAAAACAGAAGTCAATGAGG | 409 |
| hs132690481 | TGTGTGTGTATAGGTCTCATGGG | 410 |
| hs132685498 | ACTGAACAATTGGTATACTGAGG | 411 |
| hs132692326 | ATACAGATATAGCACATACCAGG | 412 |
| hs132691826 | ATGCGAAGCCACTACCCATGGGG | 413 |
| hs132692109 | TCATTTGCATGGCTCTACGTGGG | 414 |
| hs132688700 | GTATAAGACAGGGTACCTGAGGG | 415 |
| hs132689699 | GGGCTCACATTGTAGAAATGTGG | 416 |
| hs132690143 | ATGTGGTTGTGTCAACGAAGAGG | 417 |
| hs132685663 | CTGACAAGTTTCCTCCCTAGAGG | 418 |
| hs132686622 | GTGAAAAGTGATGTGAGACAAGG | 419 |
| hs132685752 | GTAATTTTGGTATATATACGTGG | 420 |
| hs132693717 | GTGCTCGGCATGAATGCAGTGGG | 421 |
| hs132683869 | GTCTGCTACATGAGGAACAGCGG | 422 |
| hs132687706 | AAATCAACACCGATAATACAGGG | 423 |
| hs132685225 | TCCTGCCTGATACAACCAGAAGG | 424 |
| hs132691463 | TGACTCATCACATCCTGGAGAGG | 425 |
| hs132683653 | CAGACAAATGGTCAAACACAGGG | 426 |
| hs132689941 | TGAACAAAAAGCTAAGAACTGGG | 427 |
| hs132687781 | TATTTCACAGTAGATATCCAGGG | 428 |
| hs132687783 | TGTGGTCTCACATACAAACCAGG | 429 |
| hs132693826 | AGGTCATGTGTAAGTCACAAAGG | 430 |
| hs132688758 | AAGCAACTAGCAATAGACAAAGG | 431 |
| hs132684215 | AAAGGCTGCCAGAGTAACACGGG | 432 |
| hs132689549 | ACATGACCTTACATACATCACGG | 433 |
| hs132692278 | ATTGCCTCTCATATTTACAGAGG | 434 |
| hs132683844 | TTGGCATTGTATAAACATCAGGG | 435 |
| hs132687584 | GGCCTTTGAAGAAATCACGCTGG | 436 |
| hs132692319 | GTGTTTCAAACACTACTGATGGG | 437 |
| hs132686754 | CTTGAAGAGATAAAAACAAGCGG | 438 |
| hs132694328 | CCTTGAAGCATACATTACCGTGG | 439 |
| hs132688081 | TCTTAATTAATGTTACTGAGAGG | 440 |
| hs132688978 | GGGCTGGCTTGAAAATCAGGAGG | 441 |
| hs132690988 | TCACAAAAAACGTTGTGTAGGGG | 442 |
| hs132690877 | AAAATACTCATGAAGTACCAAGG | 443 |
| hs132693471 | ATATGTGAGTAGAATACACTGGG | 444 |
| hs132691959 | ATCCTCCAGATTCATAACGAAGG | 445 |
| hs132690513 | ATTTAGACAACCACACTGAGAGG | 446 |
| hs132683557 | ATAATTCTCCCATCTAAGTGTGG | 447 |
| hs132688044 | ATTAGATGAAGAAAATCACATGG | 448 |
| hs132687378 | ACACGTGTTGGACGTTAGTGGGG | 449 |
| hs132690727 | AGGTACCTAATAGCAAGACCAGG | 450 |
| hs132692934 | AGTAAGAATTGAGATATGTGCGG | 451 |
| hs132694240 | GACCAACTAAAATATTGTCGTGG | 452 |
| hs132689036 | AATACATTAAAACCAGACAAAGG | 453 |
| hs132689339 | ATCTGGCCTAGGCTACATGTAGG | 454 |
| hs132688542 | AAATCAGTGATACATATCGATGG | 455 |
| hs132694252 | TCTGAAGAGCAACACCTGAGAGG | 456 |
| hs132690388 | GTAAACGACATACAAACTTGAGG | 457 |
| hs132690870 | TTAAAATCTAGAGTATTACAGGG | 458 |
| hs132686114 | GAAAGAATTTGAATACCAAGAGG | 459 |
| hs132694145 | ATTGAGAAAAAGTTGTCGTGGGG | 460 |
| hs132686478 | GTTATCAAAGTGTTAAACACAGG | 461 |
| hs132685730 | GTTGTATGATTGGATGTACTGGG | 462 |
| hs132687835 | ATGGCTGCATGATAATTAGTGGG | 463 |
| hs132693387 | ATACACGATGATCTAGTACAAGG | 464 |
| hs132687046 | GCAGTACTCTTTGTAGACAAGGG | 465 |
| hs132692877 | TGTGGGAGACATCACCACAATGG | 466 |
| hs132685312 | CATAACTAGAGAGGAAATGGAGG | 467 |
| hs132694257 | GCAGCTACTCTAGCTCATGTGGG | 468 |
| hs132684154 | CTAAAAAGTACAAGACTGTGAGG | 469 |
| hs132693256 | TGTAGCTTAGTCTCACAGCAAGG | 470 |
| hs132684554 | AGTGGTGATTCCAATCATTGGGG | 471 |
| hs132690013 | AGACACCTAATGCTAAAAGTGGG | 472 |
| hs132691063 | TGCACAACAAAAGCTTAACATGG | 473 |
| hs132691059 | GCTAGTGGGGAAGGACCGGGTGG | 474 |
| hs132689854 | ATCATCACCAAACCTAATCGAGG | 475 |
| hs132683413 | TCCTATGAATGACATACCTGCGG | 476 |
| hs132688454 | ATTTCACCTAAATTACACAAAGG | 477 |
| hs132689569 | TGTGATATCCAGCATAGATGGGG | 478 |
| hs132693589 | CATCCATAATCAGAGAAGGGAGG | 479 |
| hs132689464 | GATCCAAAGACCATTTCCCAGGG | 480 |
| hs132687951 | CCACATGTAAAAATCTCCAGAGG | 481 |
| hs132690167 | ATAATGACAGAGTGAAAGTGAGG | 482 |
| hs132694379 | GGGTTCTAAAAATCGTACGCAGG | 483 |
| hs132688825 | TCATATAATACCATAAGCTGAGG | 484 |
| hs132692979 | AGAAAGATACAGTCTAGGGGTGG | 485 |
| hs132693575 | GAAAATACTCAGTAAGACTGAGG | 486 |
| hs132687744 | TAGATTGAAAGCATTAACAATGG | 487 |
| hs132691943 | CAACCAGCAAAATAACCCTAGGG | 488 |
| hs132687498 | TTTGAAGGTTGACAACTAAGGGG | 489 |
| hs132692982 | GGGTGGACAGGTAAAGAACAGGG | 490 |
| hs132683465 | TGAAAGCATTTAAAAACTGGGGG | 491 |
| hs132683683 | CTGAAAAGAGGAAATAATCGTGG | 492 |
| hs132687953 | AGTAATTCTCTGTAGGCAAGCGG | 493 |
| hs132688972 | GCCTTTCGCATAGACATCTGAGG | 494 |
| hs132683610 | TGTTTGCACAATCTACCAGATGG | 495 |
| hs132690379 | ACTGTGTGTCCCGAAGAGATGGG | 496 |
| hs132692067 | GATTTATAATGATTACCAAGTGG | 497 |
| hs132690093 | TTGCCTTTGATGAAAATACGTGG | 498 |
| hs132690511 | AACCACACTGAGAGGAAAGGAGG | 499 |
| hs132683857 | GGTTCCAAAAAAAAGCAGAACGG | 500 |
| hs132694375 | TTATAATCCACTGATTGTAGGGG | 501 |
| hs132692966 | GGAGCTGCAGCTTTTCAAAGGGG | 502 |
| hs132691903 | TCTGCTGGATGAAAGAACACAGG | 503 |
| hs132688015 | GATTAAAAATCACCAAAACAAGG | 504 |
| hs132691624 | AACCATGCTTGACGCTAGGATGG | 505 |
| hs132691545 | AGTCTATATCAAAATATAGGGGG | 506 |
| hs132690529 | TATGTTTCTAAAAACAACCGTGG | 507 |
| hs132693056 | TTAAAATAACCATTATCACCAGG | 508 |
| hs132693121 | AATGTGACTTATGAGACTGAAGG | 509 |
| hs132691156 | ATTCACAATTGACCATTTCGGGG | 510 |
| hs132684629 | GTAGAAATGGAATAAACATGTGG | 511 |
| hs132689284 | TGTTTTGATAGCAATACCTGAGG | 512 |
| hs132687376 | TTAGTGTACTGAGAAATGAAAGG | 513 |
| hs132690518 | CAGTGTCCCTCTATGCTGTGAGG | 514 |
| hs132685707 | CTTTACAAAATGATAAACCCAGG | 515 |
| hs132693840 | TTTCCCTAAACTGAATGAGGAGG | 516 |
| hs132684656 | AAGTAAATCAGTCCATCACAAGG | 517 |
| hs132690453 | ATAAGGTTGTGCTTCCAGCATGG | 518 |
| hs132686615 | GATAGCTAGGCTAATTCCAAGGG | 519 |
| hs132685314 | GCACATTCACATAACTAGAGAGG | 520 |
| hs132687287 | GAGAAGCCAAAATCATAGCACGG | 521 |
| hs132688112 | ATGGCAGGAAGATTTATTGGGGG | 522 |
| hs132687130 | CTCCAAGCTAAAAATTCATGGGG | 523 |
| hs132688360 | TTCTAAACACGTATTCTGTGAGG | 524 |
| hs132693754 | GTTGGGTTAAGCAGTGACATGGG | 525 |
| hs132690566 | GCCATCTATTTAATAACACAAGG | 526 |
| hs132683517 | AGCCTGAAAATATAGCCAGAGGG | 527 |
| hs132686675 | AGTACCTAAAAGTGAACAGGAGG | 528 |
| hs132693990 | TGACCATGCAAACTTTCAGGAGG | 529 |
| hs132683438 | GAGAGAATAAAATAAAACGTTGG | 530 |
| hs132689647 | TTTTCAAATTTAAGCCAGAGGGG | 531 |
| hs132686213 | GGGAAGCTTATTGAAGACAGTGG | 532 |
| hs132694354 | CCAGTCTCCTCCATAGCCTGAGG | 533 |
| hs132685335 | AAAAAAATACAATGGTAAGGGGG | 534 |
| hs132693262 | ATTAGGCTAATACTGGTCTGTGG | 535 |
| hs132690162 | TTCCTCACTAATGGGAACTGGGG | 536 |
| hs132690059 | TGAACCTCTGTGATAACACTTGG | 537 |
| hs132686210 | TTATGAGGCAAATAATGAGGAGG | 538 |
| hs132692879 | CAGACAGTGATGTTTCATGTGGG | 539 |
| hs132693069 | GGTATTACCTGTAAAAACCAGGG | 540 |
| hs132688105 | GCATATGGTATGTGCTAGCGTGG | 541 |
| hs132694362 | TATCTTCACATGCTGTCATGGGG | 542 |
| hs132685043 | AAAATGTTAAGTACTGAGGGTGG | 543 |
| hs132688817 | AGTTTAAAGTGTCTTCTCAGTGG | 544 |
| hs132688684 | AATGCTACAGTAGTACAGCTGGG | 545 |
| hs132684366 | TGAGAGCTAGAAGCCGTGTGGGG | 546 |
| hs132687544 | ATAGTACAAAGATGTTCAGGAGG | 547 |
| hs132694195 | TAAACCCACGAAGAGAGAAGAGG | 548 |
| hs132688437 | AACCCAAACTGACATGTAGGAGG | 549 |
| hs132687658 | CACGCACAAGAGATGTGGAAAGG | 550 |
| hs132692655 | TCACAATGGGATGTACACTTGGG | 551 |
| hs132692654 | GCAGTGAGAAGAATATAGAGAGG | 552 |
| hs132689877 | TTTGGTTCCAGGTAATAAAGTGG | 553 |
| hs132693541 | ACTAACAGACTAATGGAAGGAGG | 554 |
| hs132687659 | TTTAGCACGCACAAGAGATGTGG | 555 |
| hs132691818 | CTACTGTGTCTGATATGTGGAGG | 556 |
| hs132684784 | TGAAAATAGAAAGTCCCGCATGG | 557 |
| hs132692008 | CCATTATTACAACACTCTAGAGG | 558 |
| hs132688987 | ATACACAAGAATCTTGGCAAGGG | 559 |
| hs132685559 | ATAACAATAATTAATACTGGTGG | 560 |
| hs132688671 | TCTGTTTTTTCCCCAAATTGCGG | 561 |
| hs132692115 | GGTTGATTGTAAATGTCCCAAGG | 562 |
| hs132683505 | GTGGTCAGCTTACAATGAGGAGG | 563 |
| hs132688690 | ATACAATAGACTGCAACCAAAGG | 564 |
| hs132684687 | GTAAAACTAACATTTACCTGTGG | 565 |
| hs132693573 | TAATTGTTTCAGTAGAACAGTGG | 566 |
| hs132687108 | GCTTGGCCTCATTAGCTCTGGGG | 567 |
| hs132688413 | ATCGTGTGTCTATATTTCAGAGG | 568 |
| hs132683617 | AATATATTACAACTTCCCGTGGG | 569 |
| hs132689807 | ACGCACAAACATAAAATCAGAGG | 570 |
| hs132686850 | AATGCATGTACAAACTAAGGAGG | 571 |
| hs132687906 | TATTTGAACTCCATGCCAGAGGG | 572 |
| hs132686336 | CTGAAAACAACGACGAAGTGGGG | 573 |
| hs132693102 | TTATATGTAAGTCTCTTCGGTGG | 574 |
| hs132688092 | CTGTGATTTTGTGAACACAATGG | 575 |
| hs132688936 | GATTGTTCTGATAACCCAAGAGG | 576 |
| hs132692246 | GTGGCACCCATCTTAATGAGAGG | 577 |
| hs132692037 | TAAGTTCAGGAGTTTTAACGTGG | 578 |
| hs132693376 | CAGATATATTCCTAGGAGGGTGG | 579 |
| hs132694299 | ACACAGTTTGGGGATTCCAGTGG | 580 |
| hs132691202 | CCAGCCAGTTCTCTAGACTGAGG | 581 |
| hs132692452 | TGTCTATGAAAAGGAGTAGGAGG | 582 |
| hs132686205 | CCAAAACATAAACATTCACAGGG | 583 |
| hs132692069 | TAGCTATAAGTGATTTAACAGGG | 584 |
| hs132689045 | ATAAGGTATTTATTACCACTGGG | 585 |
| hs132685276 | GTTTCTCAAAGAAAGACCCCAGG | 586 |
| hs132690222 | TATGAAATACTTTAACACCCAGG | 587 |
| hs132684644 | AGAGATTGATTGGTTGACAGTGG | 588 |
| hs132692053 | ACCTACATAAAAATAAGGGGAGG | 589 |
| hs132688396 | ATTACACACAAAATAGTGGACGG | 590 |
| hs132689496 | ATGCTCATCTCTAGGTATGGGGG | 591 |
| hs132693338 | CCATTACCACAATAGTCCAGTGG | 592 |
| hs132693550 | TGTAAAGGATTAGGTAACTGAGG | 593 |
| hs132689144 | GAGAAAGTGTGGAAAGCACTGGG | 594 |
| hs132690446 | ACCAACTTGAGAGAGAAGGCGGG | 595 |
| hs132693824 | TTAAATTAAGACCTCTGGGGAGG | 596 |
| hs132684280 | ACAGTTAACTAGAACTGCTGGGG | 597 |
| hs132692110 | AGAGCCATGCAAATGAGAGTGGG | 598 |
| hs132686460 | TAACTCTTAACCATTTTGAGGGG | 599 |
| hs132683989 | AGGGAATATGAAACCCCCATAGG | 600 |
| hs132691050 | GCAAAAACTCCCAAATGGTGAGG | 601 |
| hs132692199 | ACATGTTGTGGAGGAACTGATGG | 602 |
| hs132685384 | AATTACATCAACAAAAATGGAGG | 603 |
| hs132694270 | TAAAGCACTTCAGAAGACACAGG | 604 |
| hs132686017 | CTTAGCATAACCATAACCTAGGG | 605 |
| hs132689989 | GAAATGTCTAAAAATTCTGGAGG | 606 |
| hs132687190 | GGGCATTGCACCTTGCACAAAGG | 607 |
| hs132692216 | GAAAGAATTGAGACATTACTGGG | 608 |
| hs132692613 | GGGTATGGAGTGGATCAACATGG | 609 |
| hs132683363 | CATCTTCATAGACTTTATGGAGG | 610 |
| hs132694392 | TCAAAAGCTAGAAATTGATGAGG | 611 |
| hs132686432 | TCCTATATACTAGAGCCAGAAGG | 612 |
| hs132688483 | TCTAGTGGAGCAGTAACTGAGGG | 613 |
| hs132689914 | ATATATTTCGGAGACCCAGTAGG | 614 |
| hs132685586 | TATCCCTGAGAGTATATGAGTGG | 615 |
| hs132687241 | GCTACAATAATTGTTCTGAGAGG | 616 |
| hs132687184 | CCTTTAAATGAGCACAACTGGGG | 617 |
| hs132690260 | CATTGAGCACACTCTACAAGGGG | 618 |
| hs132686351 | GCATAACTCTCTCAGTCCAAAGG | 619 |
| hs132691241 | TCTAGTCCTCAGCATCATCAGGG | 620 |
| hs132686751 | AAGATTAAACATGAACCTGTGGG | 621 |
| hs132687550 | AATTATAGGGATAAACACCCAGG | 622 |
| hs132684436 | TTATTCCAATCCTAGAGTGGAGG | 623 |
| hs132693755 | ACGTAATGATGTCAACCAGTAGG | 624 |
| hs132693997 | CAGTGAAGATGAGCAACAGGTGG | 625 |
| hs132691394 | TTTCTCAGTTGGTATCTCTGGGG | 626 |
| hs132690280 | TACTGTATAAAAATAAACCAAGG | 627 |
| hs132684915 | TTTTCATAAATGAATTACTGGGG | 628 |
| hs132686106 | TTTTTTAAATTATATTCACAAGG | 629 |
| hs132686518 | TGTAAGCCACAAGTGTAATGGGG | 630 |
| hs132691626 | ATATTTTTCCTAGAAAAGCGTGG | 631 |
| hs132685910 | GTCTGATAAAACCATAACAAGGG | 632 |
| hs132693396 | ACCCTACGCATAAGAGCAGGTGG | 633 |
| hs132692949 | GCTACATACTGTAATCACTCAGG | 634 |
| hs132691100 | GATAATACCTACATAATACTGGG | 635 |
| hs132684367 | GAGAGCTAGAAGCCGTGTGGGGG | 636 |
| hs132688632 | AAAGCATGTATGTAATTGGGAGG | 637 |
| hs132688151 | ATAGGCAATAATATTATGTGAGG | 638 |
| hs132686408 | TATTATTTTATAGTTCAAAGGGG | 639 |
| hs132690757 | CTTGCCATGGAAAAAAATGGTGG | 640 |
| hs132684654 | TCTGTGCCCTTGAAGGCTAGAGG | 641 |
| hs132693143 | CTAGTTGATTATGATCCCCAAGG | 642 |
| hs132693643 | CGACAGACACCAAATGCCAATGG | 643 |
| hs132688776 | GATCTTACTTGATACTACCACGG | 644 |
| hs132683757 | CTATTGGCAATGTACACTGAGGG | 645 |
| hs132684038 | TACTAAACTCTACCACCCATGGG | 646 |
| hs132691096 | GCTAGAACCCAGCTAAGAGAGGG | 647 |
| hs132690424 | CCCAGATCTGAGTCCTGTAGGGG | 648 |
| hs132692395 | CATGTCATATGCTTTCCCATGGG | 649 |
| hs132690666 | AGGCAAAGGCTACATTGCGTAGG | 650 |
| hs132693040 | GATTATAGAAGTTTACATTGGGG | 651 |
| hs132690434 | CTGATGCCAGGATTCTGTAGAGG | 652 |
| hs132690890 | ACTGTTCGCTCAAGAAGTAAGGG | 653 |
| hs132684460 | AATGCTATGTGAGATAGGAAAGG | 654 |
| hs132692888 | AAAATGTGAATAGTTCTGAGAGG | 655 |
| hs132688783 | AATAAAATAGAGAAAAGACTAGG | 656 |
| hs132686683 | GCACTTAAGATGTTAGAGGGAGG | 657 |
| hs132684858 | CGAGACATAGTCTCTGCCAATGG | 658 |
| hs132685900 | AAATCAAGCAACACTCACACGGG | 659 |
| hs132687670 | TGTTAAACATCAATAGAGGGAGG | 660 |
| hs132684887 | CAATACTATTAACAACCCCAGGG | 661 |
| hs132694251 | TGAGCAGGGGAAGACACTATCGG | 662 |
| hs132687344 | GAAATTCTCAGATAATCTCAGGG | 663 |
| hs132690098 | TTAGCCTTGGAAGCTGTGTGAGG | 664 |
| hs132691640 | TCCGTTACACGTTTACAAAGGGG | 665 |
| hs132692360 | CTTGCCCCAATGCCATTGTGCGG | 666 |
| hs132683495 | AAAATGGCAGTGCAGAGTGGAGG | 667 |
| hs132683965 | TCTACCAATGCCGGGCTCCGGGG | 668 |
| hs132690353 | AATTCTGCTGAAATTAAGCAAGG | 669 |
| hs132684148 | AGTGTTTAGTCATATAGCAGAGG | 670 |
| hs132691510 | GACTAGATGACCATCAGAGACGG | 671 |
| hs132684901 | GAATAGAAAAAGTCTTACAAAGG | 672 |
| hs132687907 | CTATTTGAACTCCATGCCAGAGG | 673 |
| hs132683641 | GTATTTTTTTAAATTTTCAGGGG | 674 |
| hs132686256 | ATAATACATGCCAAGAGGGTAGG | 675 |
| hs132684973 | GTTTCCCACACACCTCTGGAAGG | 676 |
| hs132686841 | ATCGTCTTCCAAGAGTGTGTGGG | 677 |
| hs132689946 | ACAGTTAGCCATCCTTAGAGTGG | 678 |
| hs132686965 | TCCGGTTGCCGTGAATAGTGAGG | 679 |
| hs132687065 | TCCATGTCCTAGCTCGAGGGCGG | 680 |
| hs132688507 | ATCATCGCTGAGAAAAGGCAAGG | 681 |
| hs132684054 | GTATCTTGACCCTCTCTCAGTGG | 682 |
| hs132689830 | TTGTCAAGTTACCATGCCCGTGG | 683 |
| hs132691378 | TCATGTAGCAAGGAGTGCAGAGG | 684 |
| hs132685987 | ACATCGTTAGAAGACAGTAAAGG | 685 |
| hs132683620 | CATTTATACAGAAGACCCACGGG | 686 |
| hs132692259 | TTTGAATGTCTGGTATTGAGTGG | 687 |
| hs132685625 | GTAATTAAAAGTGCTTTAGGGGG | 688 |
| hs132690006 | CACAGAAATAGCAATATGGGAGG | 689 |
| hs132689932 | AATAATGTCAGAGATCGTGATGG | 690 |
| hs132685918 | TCATGTATCAGTAGCTTTGGGGG | 691 |
| hs132686386 | TGTTCCATAAGTATTGGGCACGG | 692 |
| hs132683843 | CTGATGTTTATACAATGCCAAGG | 693 |
| hs132683977 | TTTGAACACATCGAGGCAGGTGG | 694 |
| hs132691989 | ACTGACCTCTAAAACTTAGGGGG | 695 |
| hs132689465 | CCATTTCCCAGGGAACCAGTCGG | 696 |
| hs132692517 | GCTCTTCAAAGCAACATCTGTGG | 697 |
| hs132683959 | TTAATGTTAGTTGTTTGCCCCGG | 698 |
| hs132689723 | GCCTGTGCATACCAGATCTGTGG | 699 |
| hs132683458 | AATGATACTGGGCAAACTGAGGG | 700 |
| hs132691103 | AAATATGCATGATATTTGTGGGG | 701 |
| hs132691922 | GAATGACTCTCAGCCTAGGGTGG | 702 |
| hs132687669 | TATTGTTAAACATCAATAGAGGG | 703 |
| hs132688177 | GGGACCGAATAGACAATGCAAGG | 704 |
| hs132684217 | GTAACACGGGTGACAAATGTGGG | 705 |
| hs132683942 | GTCTTCTATGGCAAACCATGGGG | 706 |
| hs132683984 | TTGACACCCGTAGCCTATGGGGG | 707 |
| hs132686058 | TGACTGGACTATTCTTACAAGGG | 708 |
| hs132693379 | CCCTCCTAGGAATATATCTGTGG | 709 |
| hs132684980 | TTTCGTTGACCCTTAACTAGGGG | 710 |
| hs132687994 | CTTGAAAATTCAAATCCACAGGG | 711 |
| hs132685637 | TAGAGGGAGATAAAGGAAGGGGG | 712 |
| hs132684146 | CTAAACACTGAGCCATGAGGTGG | 713 |
| hs132686414 | GTAGATAATTATAACTCAGGAGG | 714 |
| hs132692738 | GTGATTAGAAGGCATTACATGGG | 715 |
| hs132688698 | GGTACCTGAGGGATCTGTGAGGG | 716 |
| hs132686979 | ACTGAGGTTACTGATTAGAAGGG | 717 |
| hs132685985 | GATCAGTGAAATTTACATTGGGG | 718 |
| hs132688255 | AGGCAAAGTGTCCTCTAGGGTGG | 719 |
| hs132691999 | ACAGATGAATTCAACACACCCGG | 720 |
| hs132691459 | CCAAATCCCCTACATTCTCAGGG | 721 |
| hs132685585 | TCAGGGATAAAATTCTGTAGAGG | 722 |
| hs132693564 | GGAGTGATAACATATTGCACTGG | 723 |
| hs132692047 | TCAATATTCTAGACATAGTGGGG | 724 |
| hs132685401 | ATAGTGCTGGGAATGCCAGAGGG | 725 |
| hs132685570 | GTCACAACCCTAGAAATGGGAGG | 726 |
| hs132693261 | AGGCTAATACTGGTCTGTGGCGG | 727 |
| hs132686997 | ATTTTTAAAGGTGTGTCTGGAGG | 728 |
| hs132687573 | TATATCAGTAACTTTAAATGGGG | 729 |
| hs132692230 | TATTGCACAGTTACATCTCAGGG | 730 |
| hs132689407 | GTACAAATGTAGGTATGAGGAGG | 731 |
| hs132686967 | ACTATTCACGGCAACCGGAGTGG | 732 |
| hs132692664 | TTCATCCTAAGGTCAATAGGAGG | 733 |
| hs132693001 | TCAAAAGAGAAAGAATCACTTGG | 734 |
| hs132683536 | TCTAGGGAGTGCATGAACAAAGG | 735 |
| hs132685481 | CCAAATAATAAGTAGAACCAGGG | 736 |
| hs132687593 | ACAACTTTTGACCAGTAGCGAGG | 737 |
| hs132684098 | GACCAACCGCTTCACCACACCGG | 738 |
| hs132690878 | GCAAGCACATCATTACTGAAAGG | 739 |
| hs132688721 | TGCGTCAAGATGCATCATGAGGG | 740 |
| hs132690324 | TGAATGCTATAGGAATAAAGAGG | 741 |
| hs132690348 | CAGCGTGAAAAAATCCTACAGGG | 742 |
| hs132683506 | ACCACTAACGTCACCTCAGGCGG | 743 |
| hs132692925 | AGTTGATCATCACATGCTTGTGG | 744 |
| hs132685131 | TGGCACCAAAGATTATAAGCCGG | 745 |
| hs132684414 | ATAGGCAGTTCAACTAAGGGCGG | 746 |
| hs132690640 | TGACACCAGCTGGACATCAGAGG | 747 |
| hs132687912 | AAACGCTGTACTCATCTAGAGGG | 748 |
| hs132685133 | TTATAATCTTTGGTGCCAGTAGG | 749 |
| hs132688912 | AAGAGTAATCATATCCCTAAGGG | 750 |
| hs132690785 | AAATGGATTGAATTTAGAGGAGG | 751 |
| hs132685235 | GATGGCCTGTGAATAGCTGTCGG | 752 |
| hs132684639 | TCTGCGTGCATTTTTTCCAGCGG | 753 |
| hs132686512 | CAGTTTTCTACCATAGACAAGGG | 754 |
| hs132692630 | TAGATCTGAAAAGTAAGGAACGG | 755 |
| hs132693339 | CATTACCACAATAGTCCAGTGGG | 756 |
| hs132688080 | GTAACATTAATTAAGAACCCTGG | 757 |
| hs132691988 | TACTGACCTCTAAAACTTAGGGG | 758 |
| hs132688627 | GCATGCAAGAGAATCAATAGAGG | 759 |
| hs132687473 | GAAAAGGAAACACTACTCCAAGG | 760 |
| hs132685584 | TCACCACTCATATACTCTCAGGG | 761 |
| hs132684401 | GTCGGTGCTTGAGAAGGTCATGG | 762 |
| hs132685338 | AGAAGGAGACTGATTTCCCAAGG | 763 |
| hs132693067 | AGCATGAGTTTCCTTCCAAGTGG | 764 |
| hs132690743 | GAGTATTAACAATAACACAATGG | 765 |
| hs132689479 | GGCATCTGAGTGAAATATGTGGG | 766 |
| hs132685402 | CATAGTGCTGGGAATGCCAGAGG | 767 |
| hs132688753 | GTGACCAAGCCTCTTGAGAGAGG | 768 |
| hs132691200 | CCTCAGTCTAGAGAACTGGCTGG | 769 |
| hs132686276 | GGAGTCATTAACTTTAGTGGAGG | 770 |
| hs132687522 | CCAACACCTAATTAATGACAGGG | 771 |
| hs132691506 | ACCTGTTGTAAAATATCGAGAGG | 772 |
| hs132687571 | TATACTTAATCTGTATGCCACGG | 773 |
| hs132691788 | TACTTTTTAAATTCTCAGTGAGG | 774 |
| hs132691435 | GCAGAGAGAAGACAGATAGGTGG | 775 |
| hs132692255 | GAGATGCAGGAATATTTGCAAGG | 776 |
| hs132689213 | GCTGCCACTACAAAAGAATGAGG | 777 |
| hs132691583 | GAAGTGCTTTTTATCCCAGACGG | 778 |
| hs132687774 | ATAAGTAAGGAATCAAGGTGAGG | 779 |
| hs132691332 | GTAAATGCAATAATGATATGGGG | 780 |
| hs132685672 | ACAATATTTAGCAATTACACAGG | 781 |
| hs132689601 | TCTATTTGTTAGATGACACAGGG | 782 |
| hs132690133 | TAAATATGAAAACCATACATGGG | 783 |
| hs132685211 | ACTATGCCCGTACATAAACCTGG | 784 |
| hs132693954 | AATTACTAATGAAAGTTGGGAGG | 785 |
| hs132688798 | ATCCTTAACTTGGAGTCCAGTGG | 786 |
| hs132685851 | GCAAAGCTCCTATTGTGGGAAGG | 787 |
| hs132684750 | ACAAAGTCTATTGTGATCAGTGG | 788 |
| hs132685657 | CCAATTCCCCTCCTCTAGGGAGG | 789 |
| hs132685991 | GCAGACCAGAGTAAATAACTAGG | 790 |
| hs132694169 | ATTCTTATTGTATTTCCATGAGG | 791 |
| hs132685947 | TTTGCTAAGGCAGCTCAGAAGGG | 792 |
| hs132688939 | GAGAGCTTGACACTGCATGCAGG | 793 |
| hs132689784 | GCCAAATTGATGCAAAGTGGTGG | 794 |
| hs132688462 | TCTCAGCTAAGGGACGACATAGG | 795 |
| hs132689501 | GCATGTTTATCAGTGTTACACGG | 796 |
| hs132687736 | GGAAATGGTGGGTTTTCCAGTGG | 797 |
| hs132693803 | ACTACATACTGAAGGATTTGGGG | 798 |
| hs132686726 | TAGGGCCCTAGAAACCTCCAAGG | 799 |
| hs132688934 | GGGAATCCTTCTGATACAGAAGG | 800 |
| hs132684437 | CTCTAGGATTGGAATAACACAGG | 801 |
| hs132691143 | TAATCAGCTGTCTATACCAGTGG | 802 |
| hs132691919 | TCGTCACCTACTCCCTTGAAAGG | 803 |
| hs132693491 | AGAGTACAAGAAGTAATCAAGGG | 804 |
| hs132691809 | ATACTAATAGAAGACAAACTAGG | 805 |
| hs132693845 | CTATGGTTAGTAATATTAGAGGG | 806 |
| hs132692064 | TCTGTAATAAAAAGTATGGGTGG | 807 |
| hs132684956 | GCAGAAATAATTCCATGATGCGG | 808 |
| hs132688938 | AGAAGCTATCTGATTACTGGAGG | 809 |
| hs132693799 | TGCAAAGTCTGCCAGCACACAGG | 810 |
| hs132692951 | TTGTGGTTATCTGATACAGGTGG | 811 |
| hs132684932 | AGTATGCAGATTTTAAGTGGTGG | 812 |
| hs132692441 | CGTTGTGAAAGAAATTTCCAGGG | 813 |
| hs132686295 | ATATGTAACACATTAAAATGTGG | 814 |
| hs132691930 | GTTTTAAACAAGACTTTAGGCGG | 815 |
| hs132689761 | TATTGTTGGAGGTTTCCTGAAGG | 816 |
| hs132686649 | CATTGTATATATAATAGAGAAGG | 817 |
| hs132689292 | TTTTGAGTGACTTTTTGTAGAGG | 818 |
| hs132694253 | CTCTTCAGAAAGATGAGCAGGGG | 819 |
| hs132688813 | TACTCAGATTCAAAAGAGAGAGG | 820 |
| hs132685911 | TGTCTGATAAAACCATAACAAGG | 821 |
| hs132690527 | TCACGCCTTGGCCTAAACAAGGG | 822 |
| hs132693756 | AATGCAGGTCAAAAGTGTGTGGG | 823 |
| hs132690038 | GGGAAATTGGAACAACAGGAAGG | 824 |
| hs132689013 | ACATAGCATTTGTGAGTGAAGGG | 825 |
| hs132688442 | GAAGTGTGAATAAAAGTTAGGGG | 826 |
| hs132691719 | CCCAACAGTCTAATAACGATAGG | 827 |
| hs132692653 | CAGTGAGAAGAATATAGAGAGGG | 828 |
| hs132685289 | TGCATTGGCAGTGACAGCGGAGG | 829 |
| hs132683588 | TGACCTACCTGAGAAAGAAGTGG | 830 |
| hs132685151 | GTCATATAGTGAGATGAGGATGG | 831 |
| hs132692466 | CAGCTACTCTACACGCAGCATGG | 832 |
| hs132694347 | GTAGCACTGTGTACACTGAAAGG | 833 |
| hs132689470 | AGTCGGGTCACAGGAAGAGTGGG | 834 |
| hs132684994 | TTATTGTCCATATAAATAGACGG | 835 |
| hs132692907 | TTTAATCAAAAATTTCAACCAGG | 836 |
| hs132690049 | TAAGTCCCTTCTTTAAACTGTGG | 837 |
| hs132691734 | AAGTCTAAGAACAAATCAGAAGG | 838 |
| hs132684810 | ACCATGCCCTCTACTGATGTGGG | 839 |
| hs132693300 | TTTGCATAAAATCTACCAGTAGG | 840 |
| hs132684478 | TTTAAAGTGGCACAAACAGAGGG | 841 |
| hs132684289 | ACGATGGAGTGCAGAATATGGGG | 842 |
| hs132683621 | TCATTTATACAGAAGACCCACGG | 843 |
| hs132686532 | ATTTATCAGTAGTTTAGGCGTGG | 844 |
| hs132687064 | AGTTCCATGTCCTAGCTCGAGGG | 845 |
| hs132684304 | AATTCTGCCTGAATACCAGAAGG | 846 |
| hs132690025 | TAAATATGCAACTCATGGAGTGG | 847 |
| hs132684072 | TGGAGGGCGACGCGCAGAGGCGG | 848 |
| hs132690639 | GACACCAGCTGGACATCAGAGGG | 849 |
| hs132686539 | AAGCAATTATGTCGATAACTGGG | 850 |
| hs132694019 | AGCCCACCAACTGAAATGAAAGG | 851 |
| hs132689218 | TCTTTTGTAGTGGCAGCCAGAGG | 852 |
| hs132684480 | GGAGGCACCAGTGTTTAAAGTGG | 853 |
| hs132688157 | ATGCCAACCTGAAGAACGTGAGG | 854 |
| hs132692858 | CATCTACCATTATTTCCACAGGG | 855 |
| hs132694155 | CTTAGGAATATGGAGCAATGAGG | 856 |
| hs132686982 | AGTTATTTCTAGAGGAACTGAGG | 857 |
| hs132686368 | ACACATCCTTGAAGAATGAGAGG | 858 |
| hs132691611 | TAAACTTTCACTCAAACCCATGG | 859 |
| hs132684542 | ATATGGCAAACTAAAGAAAGGGG | 860 |
| hs132684479 | GTTTAAAGTGGCACAAACAGAGG | 861 |
| hs132689771 | ACAGGAGCTCTAAGTCCAGTGGG | 862 |
| hs132690156 | TCCCCCAGTTCCCATTAGTGAGG | 863 |
| hs132690945 | ATTGTCCATTTACTGGACAATGG | 864 |
| hs132689271 | TTGTTGAATGCTGATCCAGAAGG | 865 |
| hs132693794 | CAAAGAGCGTAGGAATTCAGTGG | 866 |
| hs132683420 | GGTGGCTTTAGGTTAACTAAGGG | 867 |
| hs132685083 | AATGTTACATGAAAAATGAACGG | 868 |
| hs132691177 | GGATTAAATCATGAACAGGAAGG | 869 |
| hs132689113 | TGGTCTCTATATCAGTCGATGGG | 870 |
| hs132689037 | CATAAATTAATGCAAACGTGTGG | 871 |
| hs132686059 | GACTGGACTATTCTTACAAGGGG | 872 |
| hs132688833 | GTTGGAAAATAAGAGGGCAGAGG | 873 |
| hs132687820 | ATCAACCAGTAATTTCTGAAGGG | 874 |
| hs132683477 | AGAAAATGTATCTTTAAAAGGGG | 875 |
| hs132693864 | TTAGGAAGATTCTATGCACAGGG | 876 |
| hs132691409 | ACAATAGTTTACATTTACTGAGG | 877 |
| hs132684869 | GGCACAGCTACCAGGAAAAGGGG | 878 |
| hs132686329 | GGTAGCCAATTATGGCCCACAGG | 879 |
| hs132688319 | ATTGATTTGAATATACACTTCGG | 880 |
| hs132689361 | AGATGAGAAGATAGTCTTTGGGG | 881 |
| hs132694386 | CGAGAAATCATAGACCAGCTGGG | 882 |
| hs132684890 | TCTCTCTCAAAAGTACTGCAAGG | 883 |
| hs132690398 | ACTACTGTATAGGAACTACATGG | 884 |
| hs132690811 | ATATTTAAAATAAAAAGGGGAGG | 885 |
| hs132691084 | AATTTAGATCCCTTTCCAAGTGG | 886 |
| hs132689163 | ATATTTTCCACAGTAATCAGTGG | 887 |
| hs132690182 | TTGGGAATTTCAGTAGGCAACGG | 888 |
| hs132683472 | TTTTAAATGATATTTCCTTGGGG | 889 |
| hs132693720 | TGTATCTACTTGGAACTCGTGGG | 890 |
| hs132690200 | AGACAAATGAGAATGAGGAAGGG | 891 |
| hs132683914 | GAATTCACAAACACAGATAGGGG | 892 |
| hs132684972 | CACACCTCTGGAAGGAACACAGG | 893 |
| hs132692189 | GTGACTGATATGAATTCAAGGGG | 894 |
| hs132684435 | GTGTTATTCCAATCCTAGAGTGG | 895 |
| hs132694390 | ATATATCAATATCTCCTGCAGGG | 896 |
| hs132691699 | TTATTTTCTGGTTGGCACTGAGG | 897 |
| hs132691505 | TATTTTACAACAGGTATAAGCGG | 898 |
| hs132685065 | ACAGTCCTAGACACCCATAGAGG | 899 |
| hs132683743 | ATGCTAATAGATTATCCAAGTGG | 900 |
| hs132685754 | TAGACTATATTTGTAGCTGTGGG | 901 |
| hs132684881 | CATTCTCAAAAATTATATCGAGG | 902 |
| hs132689831 | GACAATGCCTGAGACTACCTGGG | 903 |
| hs132691509 | GGTCATCTAGTCTCTAATGAGGG | 904 |
| hs132689607 | GTCTAAGCTAGTACTAGGTGAGG | 905 |
| hs132690693 | TTGTTAGACCCATCTATGAGTGG | 906 |
| hs132686838 | ATATATGCTTCAATTTTGTGAGG | 907 |
| hs132691672 | GCTTATTAGGAAAATCACATTGG | 908 |
| hs132687671 | GTTAAACATCAATAGAGGGAGGG | 909 |
| hs132686457 | ACGAATTATTCATCTACCCGTGG | 910 |
| hs132683562 | GAGCAGTATGATGAAGTGCAGGG | 911 |
| hs132685549 | TGATTTAAGTGAGTGTATCAGGG | 912 |
| hs132686656 | CAGCATGGTTCAGTTGATGGTGG | 913 |
| hs132687762 | CTACTAGTAACACAATACTCAGG | 914 |
| hs132689429 | AAGCATTGTAAGGTACTACATGG | 915 |
| hs132693141 | TTTCTAAGAACTAGGCCTTGGGG | 916 |
| hs132690769 | GAAAGGAGAGAAGCTTTGAGAGG | 917 |
| hs132685158 | ATTTTACACCAGGTCGAAGGAGG | 918 |
| hs132687191 | ATGCCCAGAGCCATAAGGAGTGG | 919 |
| hs132690454 | AACCTTATATGTAGTGACCATGG | 920 |
| hs132687932 | TAACAAAAACTAGAACAAAGTGG | 921 |
| hs132686087 | ACAGGGACCATCCTATCCATAGG | 922 |
| hs132687511 | GGAAGAAGCTGGGAGTCCAAAGG | 923 |
| hs132683409 | TTTCTGCTACCAGTAGAAGTGGG | 924 |
| hs132687236 | TGATTTTAAAGAAATAGTAGTGG | 925 |
| hs132686122 | TCCGTGAGCCTAAAGAACAATGG | 926 |
| hs132683923 | TATACAAAACAAAACATGAGAGG | 927 |
| hs132689664 | ACTAAAATAGCTAACTTCAGAGG | 928 |
| hs132693429 | CCTACACTATGCAAGTGGGTTGG | 929 |
| hs132693815 | AGTAACACAAAGCAAAAATGTGG | 930 |
| hs132687643 | TGTCACTTTCATTTATTCGGGGG | 931 |
| hs132685919 | ATGACAGGTTTATATTCTGGAGG | 932 |
| hs132688371 | ATTGGCTTAGAAAACATGAGTGG | 933 |
| hs132688559 | TATACTTATATTCAAGCACAGGG | 934 |
| hs132690907 | AGAGTTCCCAGGACGCAGGAAGG | 935 |
| hs132684214 | AAAAGGCTGCCAGAGTAACACGG | 936 |
| hs132684464 | AAAGTAAGCAAAATTGAGGAGGG | 937 |
| hs132684352 | ACTCTTGATTTCACTGACAGAGG | 938 |
| hs132691373 | CATGAATAAATACATTCAAGAGG | 939 |
| hs132685233 | GTAGACCGACAGCTATTCACAGG | 940 |
| hs132685618 | TAACTCATAGTTATATAATGGGG | 941 |
| hs132691718 | CTAATAACGATAGGAAACAATGG | 942 |
| hs132684286 | ATTGCCTTCTTACCTGACGATGG | 943 |
| hs132693603 | TTTCATACACACTCATCATGGGG | 944 |
| hs132692241 | TCATTCAGAGATTATAACCAGGG | 945 |
| hs132689402 | ATTTACTGTGGCAACAGGAGAGG | 946 |
| hs132692218 | TGTCTGTGAGACAAAATGAAAGG | 947 |
| hs132691245 | TGTTGACCCTGATGATGCTGAGG | 948 |
| hs132689945 | TAGTGAGACCACTCTAAGGATGG | 949 |
| hs132688030 | CTACATAAACTCTATTCATGGGG | 950 |
| hs132690410 | GCTTTGGTGGGAAGAAGTAGAGG | 951 |
| hs132685053 | TCCCTTAAGACTTACTCTGACGG | 952 |
| hs132683657 | CACAGGGCCTGGATTATAAGGGG | 953 |
| hs132692211 | ACGCAGATTGTAATTAGAGGTGG | 954 |
| hs132686519 | GTAAGCCACAAGTGTAATGGGGG | 955 |
| hs132685879 | AATAGCAAGGAGTAGATACAGGG | 956 |
| hs132691274 | CCTTTAAGTAAGACAGCCAGGGG | 957 |
| hs132692017 | TTATACAAATAAATTTACAAGGG | 958 |
| hs132684024 | TCGAATGTGGATATCCCAAGAGG | 959 |
| hs132691855 | TGGGGACAACAGCAAAGTGGTGG | 960 |
| hs132685813 | ATTCAGGTTTGGGATCAGGAAGG | 961 |
| hs132694254 | GCTCTTCAGAAAGATGAGCAGGG | 962 |
| hs132688171 | GCGAAAACCAGAGCCACACTAGG | 963 |
| hs132690633 | ACTTCACATATGCCTCACTAAGG | 964 |
| hs132693858 | CATAAACTATTAGTGCCTGAGGG | 965 |
| hs132692903 | ATACATAGCCCATATGTCAAAGG | 966 |
| hs132688156 | GGAGAGCTGCAGCCTACATGAGG | 967 |
| hs132685154 | CCCTACATAATAGTATGCAAGGG | 968 |
| hs132688065 | ATAGTGTGGGTCAACTGAAGGGG | 969 |
| hs132694290 | GAATGGATTGGACAGACGCTAGG | 970 |
| hs132687102 | TCTGTGACGACGATCATTGGTGG | 971 |
| hs132683383 | TTCTTGTATTAAAGACGTAGAGG | 972 |
| hs132687513 | GATCGGCAAAGGAAGAAGCTGGG | 973 |
| hs132692054 | AATACCTACATAAAAATAAGGGG | 974 |
| hs132689844 | ATAAAATATCATGATGATGGAGG | 975 |
| hs132690839 | TTAATACTGCAATATAAGCAAGG | 976 |
| hs132692071 | ACTTATAGCTACGATCCACTTGG | 977 |
| hs132692225 | TCAGGGTAATGCTTAGAGGTGGG | 978 |
| hs132689410 | TTTAGCATAGTTGCAATGTGTGG | 979 |
| hs132692787 | ATTTTGGATTCTGGAGACAGTGG | 980 |
| hs132691712 | CCAGTTTCCAAAAAAGTCTGAGG | 981 |
| hs132691613 | ATAATTAGACAATTCAGAGAAGG | 982 |
| hs132685713 | AAAAGAACCTAAAGTACACAGGG | 983 |
| hs132683416 | AATGGACATATTTTCCCAAGTGG | 984 |
| hs132686270 | ATAAATTCATAGTCAATATGGGG | 985 |
| hs132688450 | TGGTGGCTTGAGGAAATGTGGGG | 986 |
| hs132685103 | GTGCTAACATGCAGTAGAGGAGG | 987 |
| hs132685741 | TTTTTTTTCAGTCAATCTAGAGG | 988 |
| hs132692171 | AGATGTCATTGGAAAAATGGGGG | 989 |
| hs132690692 | TGTTAGACCCATCTATGAGTGGG | 990 |
| hs132688422 | ACAGGATTGTTGATTGCCTGTGG | 991 |
| hs132692335 | AGACTATTGCCTTCATAGCGAGG | 992 |
| hs132686484 | GATGAATGATCACATTAGGAAGG | 993 |
| hs132685068 | ACAAGTGCTAGTGCGTGAAGTGG | 994 |
| hs132694335 | TCAGTAAATTAATTAGCAAGTGG | 995 |
| hs132690094 | TGCCTTTGATGAAAATACGTGGG | 996 |
| hs132692460 | CCTCCACCTTGAGGGCTCAGAGG | 997 |
| hs132686128 | AAAAAAAGAAACTTCCAAAGAGG | 998 |
| hs132690609 | TCCATAGACAATGAAGCCCATGG | 999 |
| hs132690536 | TGGCAATTAAATGTATCTCAGGG | 1000 |
| hs132686970 | ACACTCCCCTCTCACAGCAATGG | 1001 |
| hs132686255 | GTGTATAATACATGCCAAGAGGG | 1002 |
| hs132693432 | CCAACCCACTTGCATAGTGTAGG | 1003 |
| hs132685458 | GCAAGTCCAAAGGCATGTGATGG | 1004 |
| hs132693873 | AATTGTTTATGACTGTGGGATGG | 1005 |
| hs132685488 | ATACCTCAAAGGAAAATGGCCGG | 1006 |
| hs132693313 | GTAGAAGTACTATATATAGGAGG | 1007 |
| hs132691037 | ACTTTGCCTACACAAAAAGCTGG | 1008 |
| hs132690447 | AACCAACTTGAGAGAGAAGGCGG | 1009 |
| hs132687164 | TCAAGGGCTTGTGAAGATGAGGG | 1010 |
| hs132683514 | CAGAGGAGAAAAATGAGAAGAGG | 1011 |
| hs132691137 | GCAGACATATTATCTGATCAGGG | 1012 |
| hs132688218 | GACTGGCTAGACTAGGGCTAGGG | 1013 |
| hs132688520 | ACATACGGATGAATTCAGTAAGG | 1014 |
| hs132686340 | AAACAACATCTACCTGTAAGGGG | 1015 |
| hs132694098 | ATGAGAGCTTTATACTAAGACGG | 1016 |
| hs132694317 | TTTTGCATCCAAATGCTACAGGG | 1017 |
| hs132690147 | CATTTGAATAAAAGAATCTGAGG | 1018 |
| hs132688070 | TCAAATCCAGATGCTACCACAGG | 1019 |
| hs132691372 | ATGAATAAATACATTCAAGAGGG | 1020 |
| hs132686853 | AGCAATGTCAGCGAGCTTGGTGG | 1021 |
| hs132684822 | TACATTTTTTATGAGCCCCGTGG | 1022 |
| hs132686528 | AAAGGCATTATGGTAGGGGGAGG | 1023 |
| hs132686825 | TAGTTTTAATGGCCCAAAAGGGG | 1024 |
| hs132693400 | GCCAAGTGCCAAATGGTGCAGGG | 1025 |
| hs132690631 | TTAGTGAGGCATATGTGAAGTGG | 1026 |
| hs132683764 | TCACTGAGTTGAACTTGTAGAGG | 1027 |
| hs132691385 | TCTACTGCATATAACACTGATGG | 1028 |
| hs132689448 | AGGGCAAAAGAACTGTAGACGGG | 1029 |
| hs132689937 | TAGTACTTGGCATAAACAGTAGG | 1030 |
| hs132690247 | AAGTTAAAATGGCAACACCATGG | 1031 |
| hs132687995 | CTATCTTTTCAAGATCCCTGTGG | 1032 |
| hs132693374 | ACCACAGATATATTCCTAGGAGG | 1033 |
| hs132684166 | ATTTGCAGCCTTTTGTAGAGGGG | 1034 |
| hs132688954 | ATTTACGTATATTATGCCCAAGG | 1035 |
| hs132693919 | ATGGCAGAAGAACTAAAGGCAGG | 1036 |
| hs132690541 | ATAATGATTTCTGCATTGTGTGG | 1037 |
| hs132693880 | CTGTTTGTATGGCTAGGGTGAGG | 1038 |
| hs132687286 | TTTTGGCTTCTCTCCTAGGGAGG | 1039 |
| hs132684821 | ACATTTTTTATGAGCCCCGTGGG | 1040 |
| hs132694151 | AAGACTATAAAACTGAGGAAAGG | 1041 |
| hs132683849 | AATGCAATTACAATTATGCAAGG | 1042 |
| hs132686218 | TCTCTGTTGGAAGTGAATAGGGG | 1043 |
| hs132688732 | CAAAGGAAATAAAAGTATGGCGG | 1044 |
| hs132691048 | TCTGAGGTGAGAAGCTAGTGAGG | 1045 |
| hs132692274 | CTGCCCTCTGTAAATATGAGAGG | 1046 |
| hs132692222 | TATTCCAAGGGCCTACCGCAAGG | 1047 |
| hs132691095 | AGAACCCAGCTAAGAGAGGGAGG | 1048 |
| hs132690810 | TCTATATTTAAAATAAAAAGGGG | 1049 |
| hs132693796 | CTTGAGGCTGCAAAGAGCGTAGG | 1050 |
| hs132688644 | TCAATAAATTCGTAGCCCTAGGG | 1051 |
| hs132691918 | AAGGGAGTAGGTGACGAAGATGG | 1052 |
| hs132692093 | AGGTGTGTCTCAGGGTAGAGAGG | 1053 |
| hs132692973 | GGCCTTCCTTAGAATCTGCACGG | 1054 |
| hs132689197 | TTGAGAGTGATTGTTACCAAAGG | 1055 |
| hs132689346 | AAATATATATTCAATACCATAGG | 1056 |
| hs132687765 | CTCACAGTCGCCCCTATGAGGGG | 1057 |
| hs132686367 | GGACTGCTGAGTTTCTGTAGAGG | 1058 |
| hs132683824 | GAGTGGTTCCTTCATGACATGGG | 1059 |
| hs132689247 | AATGAAAGTTGTAACAGGAGAGG | 1060 |
| hs132691696 | TGACCACTAACTAAATCTGAAGG | 1061 |
| hs132691013 | GCCTAATCTAATTCATAGTGAGG | 1062 |
| hs132690102 | AGTGCTGACTTAAAGGGCAAGGG | 1063 |
| hs132690415 | AGGCAGCGATAAAAAAAACCTGG | 1064 |
| hs132685941 | TTGCAGTTTGTGTGGTTACGTGG | 1065 |
| hs132683369 | GAAAGTACGCATGCACATGTAGG | 1066 |
| hs132693142 | CTAGCCTGAGCCACACACAATGG | 1067 |
| hs132691008 | TGGGTCCCCATTAATTAGCAAGG | 1068 |
| hs132688306 | AGTAAGCCTTTGGATGGGGAAGG | 1069 |
| hs132684861 | ACTCCCAAAGATATATAAGTCGG | 1070 |
| hs132693488 | CATTTACTAGATAACAAACATGG | 1071 |
| hs132690249 | TTTTATAGCATGAAACCCCAAGG | 1072 |
| hs132687882 | TTTGCAAAACAATTTAAGAGGGG | 1073 |
| hs132693257 | ACAACGTGCTATTAGCAAGTAGG | 1074 |
| hs132686521 | GGGGGGATCTCCTAAACGAAAGG | 1075 |
| hs132689526 | TCCCTGACAACACGAAAGCATGG | 1076 |
| hs132688928 | ATCATCTCAAAGAACTACATGGG | 1077 |
| hs132693198 | GTAGGAAGGAAGGCAAACTAGGG | 1078 |
| hs132685643 | GGAATAAAATAAGAATGCGAAGG | 1079 |
| hs132689550 | CCTTACATACATCACGGAGTTGG | 1080 |
| hs132683894 | GAGCATCATGACCTTACAAGAGG | 1081 |
| hs132693522 | TTTCAAAGAAGGCTGACCACAGG | 1082 |
| hs132686879 | AGCTAGTTTTTTTTTCAGGGGGG | 1083 |
| hs132692889 | TGTCTTCTAGGGTACACTGTAGG | 1084 |
| hs132683625 | TCATTCTTTTGAGCATGAGGAGG | 1085 |
| hs132685063 | ACTATCAGCAATTAGTGAGAGGG | 1086 |
| hs132687268 | AGTACCTTACAGTGCAAGCAGGG | 1087 |
| hs132687512 | CGATCAGCTTTAAGGGACAGTGG | 1088 |
| hs132687637 | TATCTTTGATTGAGGGAAGGAGG | 1089 |
| hs132683670 | TGTAATCCAGAATGGCCCATAGG | 1090 |
| hs132689087 | AATCATTATTATCAACAGAAGGG | 1091 |
| hs132684332 | TTTTTTTACAAGGGAATGTGAGG | 1092 |
| hs132690600 | TAGAATTCAAGCAATTTGGAGGG | 1093 |
| hs132688260 | CTATTATTCAAAAGCCAGCAAGG | 1094 |
| hs132688240 | TCTTATAATAGGTTATTGGAAGG | 1095 |
| hs132684151 | GGGCTGCCAGGTAAATTGGAAGG | 1096 |
| hs132684413 | AGAATAGGCAGTTCAACTAAGGG | 1097 |
| hs132688927 | TGATCGATCTATGTTTTGGGAGG | 1098 |
| hs132692453 | GTGTGTCTATGAAAAGGAGTAGG | 1099 |
| hs132693397 | AGAACCCTACGCATAAGAGCAGG | 1100 |
| hs132685497 | TGTTCAGTTTTGGTGCAAGGTGG | 1101 |
| hs132689274 | TGTGCTAGCATAATCTCACTAGG | 1102 |
| hs132689793 | AAAAAGAGCCCCAATTTGTGGGG | 1103 |
| hs132690862 | GCTATTAGGTCTATGTGAGGTGG | 1104 |
| hs132683624 | AATCCTACTAATTATTAACATGG | 1105 |
| hs132691217 | AATGTAGTACATATCCCCATTGG | 1106 |
| hs132684224 | ATTTCTTAAAATCCTCACGAAGG | 1107 |
| hs132687758 | AGGTGAGAGCTGGCAAACACAGG | 1108 |
| hs132689720 | TTATTATAAAAGCAGGTCAGAGG | 1109 |
| hs132692815 | GGAAGGATCTGCGCTAGGTGTGG | 1110 |
| hs132684394 | GCATGTAGATTAGCCTCACAGGG | 1111 |
| hs132691005 | AGATTAGCGCCATCTCCCATGGG | 1112 |
| hs132694186 | TGAACATAGGGATATGAGAAGGG | 1113 |
| hs132689759 | TTCCTGAAGGAGACTTAGAACGG | 1114 |
| hs132686171 | TCCAAACTGATAAGTCCTCAGGG | 1115 |
| hs132685093 | TTTTAATCAAGTATATTCGGTGG | 1116 |
| hs132687606 | ATACACCTAATTGCTCTCTAGGG | 1117 |
| hs132684650 | TTTCAACCTCTAGCCTTCAAGGG | 1118 |
| hs132685025 | GCATAAGAGGACACTGCACATGG | 1119 |
| hs132685735 | CACATGATTGAGTATCTTAGGGG | 1120 |
| hs132691014 | GCTGTCCTTGCTAATTAATGGGG | 1121 |
| hs132686049 | CATTGTTGACTCAAGGACACTGG | 1122 |
| hs132694389 | GAGTTGTTGAAAAACCCTGCAGG | 1123 |
| hs132693131 | CTGTGCATAAACACTCAACCAGG | 1124 |
| hs132689188 | ACGCAAATTCTAGTTTAAAGCGG | 1125 |
| hs132690372 | ACACTCCACAAGTCAAAGATGGG | 1126 |
| hs132684239 | CCTGTTTGTTTCTTTCACTGTGG | 1127 |
| hs132690660 | ATCCAAGACTGAAATGGTAGGGG | 1128 |
| hs132692126 | CTTCTCAAGTGTCTAAGCTGAGG | 1129 |
| hs132691117 | AACATGTCATCTGGTAACCATGG | 1130 |
| hs132688000 | TTAGAAATAAACTAGCCAGAAGG | 1131 |
| hs132684296 | TATGGTTCTGAATTAGCACTCGG | 1132 |
| hs132687272 | AGGGAGGCATTATTGCTCAATGG | 1133 |
| hs132683596 | AATTCTGTGATTAAGTGGCAGGG | 1134 |
| hs132693427 | TAGACCCTACACTATGCAAGTGG | 1135 |
| hs132690161 | TCCTCACTAATGGGAACTGGGGG | 1136 |
| hs132685064 | AACTATCAGCAATTAGTGAGAGG | 1137 |
| hs132689622 | AGTTCACCTACATCTAAAGAAGG | 1138 |
| hs132693144 | CTGAGCCACACACAATGGATAGG | 1139 |
| hs132693110 | GGGTAATAGGAATATGGGATGGG | 1140 |
| hs132693081 | ATCCACACACTATTTTGAAGAGG | 1141 |
| hs132690899 | GGGAAAAAACGGATTGGAGTGGG | 1142 |
| hs132685594 | ACATATTTTAGTCAAATCAGAGG | 1143 |
| hs132683464 | GTGAAAGCATTTAAAAACTGGGG | 1144 |
| hs132686805 | GATATGTTTAATCAAAAACATGG | 1145 |
| hs132689143 | AAGTGTGGAAAGCACTGGGTTGG | 1146 |
| hs132687342 | AGAATGATCTGCTTAACACTTGG | 1147 |
| hs132694351 | TTTAGCTCCTCAGGCTATGGAGG | 1148 |
| hs132692816 | ATCCTTCCTCTCATAAATGAGGG | 1149 |
| hs132685101 | GTACAAATATTACATTAACATGG | 1150 |
| hs132683611 | GCATGTGTTAGATACAATGCAGG | 1151 |
| hs132692749 | TTAGGAGTAATTACCACGGTGGG | 1152 |
| hs132687336 | CGTGAGTCAGTAACCCCTGAAGG | 1153 |
| hs132694101 | GGAAAATATAAGTCAGAGGGAGG | 1154 |
| hs132686211 | ACATTATGAGGCAAATAATGAGG | 1155 |
| hs132690971 | GAATACTGGCCTTTACTGGAGGG | 1156 |
| hs132690653 | GCAAAATGGGTGTGGTAGCGAGG | 1157 |
| hs132693959 | AATTACTAATGAATGTTGGGAGG | 1158 |
| hs132685757 | ATTTCTTTAGGAGATACTCATGG | 1159 |
| hs132693655 | CTCCATATATTCTTTCAGTGTGG | 1160 |
| hs132691128 | TGTAACAAGAAACAAAGCTAAGG | 1161 |
| hs132691091 | AATGCTGCATGTCATATACCTGG | 1162 |
| hs132686455 | ATAAACTGCAGACACTTCCACGG | 1163 |
| hs132687846 | GCTAAAAGCCAGTGAGAAGACGG | 1164 |
| hs132688071 | AATCCAGATGCTACCACAGGAGG | 1165 |
| hs132687037 | TGAAAATTGAGAGTAGGGAACGG | 1166 |
| hs132686018 | AGCCCTTCTCTTAAGTAGCACGG | 1167 |
| hs132686856 | TGAAGGTTCAATAAATAGGTCGG | 1168 |
| hs132692425 | CCTCTGACTGTCCATGAGAGAGG | 1169 |
| hs132686089 | AGCTTCCTAGTGGCCACACAGGG | 1170 |
| hs132685308 | AAAAGCTTCACTGATCAAGATGG | 1171 |
| hs132691687 | CCATATTAGAAGCAAGTCCAAGG | 1172 |
| hs132684472 | ACTGATCGTGTTGCTGACAAAGG | 1173 |
| hs132687249 | CCTAAATATACAGTACATCAGGG | 1174 |
| hs132691864 | AACTTGGAAATAATTTTTAGGGG | 1175 |
| hs132687226 | ATAATCACTCACATTTCCCAAGG | 1176 |
| hs132690472 | AAAATAACTTTGGTAGACAGTGG | 1177 |
| hs132690519 | ATTGTACCTCACAGCATAGAGGG | 1178 |
| hs132683474 | AACATATTAACTAGCCCCCAAGG | 1179 |
| hs132688271 | TTTACTAGATCATCACCGGCAGG | 1180 |
| hs132684196 | ACACAGCACACACGAATGCATGG | 1181 |
| hs132687426 | TCTCTTTTTATAGTGGTGGGGGG | 1182 |
| hs132691684 | ACTCCATCCATTAGTAATCACGG | 1183 |
| hs132684813 | ATAATACCCACATCAGTAGAGGG | 1184 |
| hs132687760 | AGTATTGTGTTACTAGTAGAGGG | 1185 |
| hs132686881 | ACAGCTAGTTTTTTTTTCAGGGG | 1186 |
| hs132685726 | AGAAAAATGAAGTAGAGCAAAGG | 1187 |
| hs132688353 | AATAGACTGCTATCCTGCCATGG | 1188 |
| hs132692814 | TGAGAGGAAGGATCTGCGCTAGG | 1189 |
| hs132689511 | TCAATGGAGATTGGTGAGAGGGG | 1190 |
| hs132688646 | AAGTAAGCTGTCATTACCCAAGG | 1191 |
| hs132691449 | GGGAGGACTAGTTCTTCCTAAGG | 1192 |
| hs132687969 | AATGTACAAAAAAAATACAATGG | 1193 |
| hs132691051 | TTTTTGCTAGGAGAGAAAAGTGG | 1194 |
| hs132689127 | TGATGTGGTGGATAACAGCAAGG | 1195 |
| hs132688023 | ATTGATAGCAAGATTTCAAGGGG | 1196 |
| hs132686469 | AATTACTCCAAGAAATGTGTAGG | 1197 |
| hs132688366 | GTAGCTAAAAAGTCTTGTAGAGG | 1198 |
| hs132693537 | GCATAATTCTCAAAAAGAGGGGG | 1199 |
| hs132693126 | AGAACTAATCCTTTTCACCATGG | 1200 |
| hs132692111 | TAGAGCCATGCAAATGAGAGTGG | 1201 |
| hs132684183 | GATTCCCAAAAGTAAGTGAAGGG | 1202 |
| hs132686764 | ATTCGGAACACAGTTGAGAGAGG | 1203 |
| hs132688589 | GAGTATGGCTAATAATTCAAAGG | 1204 |
| hs132686931 | AGTCATCCAAATATATCCCAGGG | 1205 |
| hs132683429 | CATGTGCATATTAATAAGAGAGG | 1206 |
| hs132688854 | CCCTCAATCCCAATTCTGCAGGG | 1207 |
| hs132691742 | AGTGGAGAAAGGCATCTCTAGGG | 1208 |
| hs132687320 | AAAAGCTTAAAGCTAACGGAGGG | 1209 |
| hs132686633 | GCAGTAGTAGTAGTTGTACTGGG | 1210 |
| hs132685288 | CTGTGCATTGGCAGTGACAGCGG | 1211 |
| hs132683935 | GTTTAAATGCACAATGCCAAGGG | 1212 |
| hs132686629 | GTCAAAGTAGCATCTTGCTGTGG | 1213 |
| hs132688012 | AAATATCCATCTTTGTGGCAGGG | 1214 |
| hs132686692 | GATACTGCATGGAACTCGGGTGG | 1215 |
| hs132690478 | ATGCAGCAGCTGAATTCTGAAGG | 1216 |
| hs132689245 | GTTGTAACAGGAGAGGAGCTGGG | 1217 |
| hs132687592 | TCACACTGAGAGTACCGCTCAGG | 1218 |
| hs132686567 | TATTATAGCTCAATTTCACCAGG | 1219 |
| hs132690369 | TTATTCTAAAATAGATATGAGGG | 1220 |
| hs132690219 | AAGTATTTCATAATCTCTAGAGG | 1221 |
| hs132684096 | TCAAGACCGGTGTGGTGAAGCGG | 1222 |
| hs132684406 | GCAAGCTGGCAGTCTTTCAAGGG | 1223 |
| hs132691752 | GAAGCTTTCCTCATAACTGTAGG | 1224 |
| hs132692219 | TAGTCACTTGCTCTTCCTTGCGG | 1225 |
| hs132683306 | CCATGCCATCCACCCAACCATGG | 1226 |
| hs132687929 | CAGGGCCATCAGCTGCCTGAAGG | 1227 |
| hs132691230 | GGCCAGTGCAGAACACACCTGGG | 1228 |
| hs132686971 | GCAATGGTTTCTTCCCTCACCGG | 1229 |
| hs132693927 | GTACAGAAGTAGATCATGGAAGG | 1230 |
| hs132686109 | AACAAGCTTACTGATATAGAGGG | 1231 |
| hs132690938 | GGCGAAAGAATCACTGAGAGTGG | 1232 |
| hs132685464 | AGCCAGGCTACGGAGCAGCTCGG | 1233 |
| hs132692277 | TTGCCTCTCATATTTACAGAGGG | 1234 |
| hs132690355 | TATCATTACAAATATATGCATGG | 1235 |
| hs132686959 | TAGCCAAGCACAGATAAAGCAGG | 1236 |
| hs132688234 | AGTTTATCTCCTAAATATGAGGG | 1237 |
| hs132683667 | AACAATTGAGGAGCCCTACAGGG | 1238 |
| hs132684373 | ACCCTCCCCACACCCCCACACGG | 1239 |
| hs132688793 | ATTTTACTAATAGTGACAAGAGG | 1240 |
| hs132694358 | TTATTTGCTTGTTACCCTAGTGG | 1241 |
| hs132692945 | TGTGCCTATCCTAATAAGCAGGG | 1242 |
| hs132693981 | AAGGTCTCTAAAGATAGCATAGG | 1243 |
| hs132690651 | AGAGAATTGCAAAATGGGTGTGG | 1244 |
| hs132689366 | ATACATCTACTGCTAATGATGGG | 1245 |
| hs132685505 | AGTTACATATTAAACAGCTAAGG | 1246 |
| hs132686404 | TAGTTCAAAGGGGGATAGGACGG | 1247 |
| hs132691546 | AAGTCTATATCAAAATATAGGGG | 1248 |
| hs132689893 | GCTAAGTTCAAGTGAAGTAGAGG | 1249 |
| hs132686566 | CTATGTAGCCGAAAGTTCCAAGG | 1250 |
| hs132684340 | AAGATGGCATTGTTAGGTGGTGG | 1251 |
| hs132684403 | AGAAGGTCATGGAAGTTAGGAGG | 1252 |
| hs132692932 | AGATATGTGCGGCTAACACAGGG | 1253 |
| hs132689954 | CCATTCTCTAGACTTGCATAGGG | 1254 |
| hs132687147 | TTACTTTGTCAGTACTTCAGGGG | 1255 |
| hs132692316 | GTACTAGCCATCAAAATTTGGGG | 1256 |
| hs132688990 | GATTCATGCAAAACTAGACTAGG | 1257 |
| hs132693973 | GCCCTCCTTTGTAACCTCTGAGG | 1258 |
| hs132693302 | CATAAAATCTACCAGTAGGTGGG | 1259 |
| hs132691345 | AGTGCAACATGATTGGACATAGG | 1260 |
| hs132686548 | GCTTTAGAACCAAAAGTCGATGG | 1261 |
| hs132693976 | GACCTCAGAGGTTACAAAGGAGG | 1262 |
| hs132687628 | ATTGCTGTGCTAGATTACACTGG | 1263 |
| hs132689786 | TCAGCTTTGTAACTCCTCAAAGG | 1264 |
| hs132687749 | TTAGTGAACGTATTTCAACTTGG | 1265 |
| hs132685172 | ACCTTAAAACAAGTTACAGAGGG | 1266 |
| hs132689066 | CTTGCATCAGTTTCTAAACGAGG | 1267 |
| hs132688608 | ATGATGCCTTGAGTGTGGCTGGG | 1268 |
| hs132690687 | AACAAAGCCCAGAAGAATGAGGG | 1269 |
| hs132687899 | GAACTCAAGGTTTTCAACAAGGG | 1270 |
| hs132685457 | ACATTGAATGGCAAGTCCAAAGG | 1271 |
| hs132687834 | AATGGCTGCATGATAATTAGTGG | 1272 |
| hs132687435 | AGCTTCCTTTTACATCCAAGAGG | 1273 |
| hs132693352 | TAGGGCTTACTTATGATGCAAGG | 1274 |
| hs132688370 | TTGGCTTAGAAAACATGAGTGGG | 1275 |
| hs132694059 | TTATGAATACAAAGAGCTAAGGG | 1276 |
| hs132693534 | AATAATTGTAGTAGAAACCAAGG | 1277 |
| hs132685219 | AATGGGAGAAATCCAAGCATAGG | 1278 |
| hs132693708 | ACATCTTGAATGAAAACAAGAGG | 1279 |
| hs132689543 | ACTCCTAACCCTTTAGCCAAAGG | 1280 |
| hs132692116 | CTTAACTCTCTGTTGTGAGGGGG | 1281 |
| hs132690073 | TTAGTAGACGCTGAAGGGCAGGG | 1282 |
| hs132684646 | CCTCTTTGAGCAGAGATCAAGGG | 1283 |
| hs132688248 | CTAAGCCCGTGTCTATGAAGTGG | 1284 |
| hs132684677 | TTTAAATACTGAAGTTCACATGG | 1285 |
| hs132683370 | TCTGCCAAAAGCTCAATATGAGG | 1286 |
| hs132687309 | TGCACAGACATCTTACAACATGG | 1287 |
| hs132686944 | AGACATTTCAAATTCTGCGGAGG | 1288 |
| hs132692496 | CTGTAACTGGAGACAAGAAGGGG | 1289 |
| hs132692206 | CATAGGGAGGAATCCCACAATGG | 1290 |
| hs132685668 | GGCTGGTTAAAAGCTTTCAGAGG | 1291 |
| hs132686194 | GCCACTGTTCATTTTAACTGGGG | 1292 |
| hs132683790 | CCATAAAAAGAATGGTACAATGG | 1293 |
| hs132690509 | AGAGGAAAGGAGGTGACCTAGGG | 1294 |
| hs132689885 | ACTAATTAATACTTGCCAGTCGG | 1295 |
| hs132685602 | GTTCAATCCTATGATAATCAGGG | 1296 |
| hs132687661 | AACTCACAAATATTGTTGCAGGG | 1297 |
| hs132685744 | GAAATGGCTTCGGAGATACATGG | 1298 |
| hs132687889 | AATCAGGACAGTAATTTGGTAGG | 1299 |
| hs132683839 | TTGTTTGAGTAACCTAGCTGAGG | 1300 |
| hs132689760 | CCTCCAACAATAGCTCAAGCAGG | 1301 |
| hs132683718 | GTGAGTTATTGTAATAGCAATGG | 1302 |
| hs132689048 | ACATTCTGTTTTTATCCCAGTGG | 1303 |
| hs132683317 | GCATCTACATACTCTAACATGGG | 1304 |
| hs132690179 | TGGAGGCCTACAACCTCTGAAGG | 1305 |
| hs132693172 | GGAACCATTAGTACTTACAATGG | 1306 |
| hs132687867 | GAACATTTAATATATAGGAATGG | 1307 |
| hs132683831 | AAACCAGTATTTTCAAAGCGTGG | 1308 |
| hs132688743 | TCGGATGCTGGCCATAAACAGGG | 1309 |
| hs132689548 | GGAGGTAGCAGCAATAAGCTGGG | 1310 |
| hs132687398 | ACAAATTCCAATAAATGATGAGG | 1311 |
| hs132687165 | AAGCCCTTGAAGAGGAGTTGAGG | 1312 |
| hs132692346 | ACATGGGCAACAAATTAGATGGG | 1313 |
| hs132694165 | GCTGCTCAGGAACATCCTCATGG | 1314 |
| hs132684182 | GGATTCCCAAAAGTAAGTGAAGG | 1315 |
| hs132687526 | TGCCAGCATATGTAGTAAGTAGG | 1316 |
| hs132688757 | TATCCTTCACCTCTCTCAAGAGG | 1317 |
| hs132684883 | GCTGGGAATAGAAGATGTCAGGG | 1318 |
| hs132687897 | AGACTATTAAGAAGAACTCAAGG | 1319 |
| hs132685321 | ATGTAAACTAATAAAAACGTTGG | 1320 |
| hs132684322 | GTTGATATGCTAAATAAAAGGGG | 1321 |
| hs132687254 | AATTTATTCAGTATGTCACCAGG | 1322 |
| hs132688008 | TAGACTAAATTCAAAGACTGAGG | 1323 |
| hs132683891 | ATCATGACCTTACAAGAGGAAGG | 1324 |
| hs132684178 | TGATTTTTCATTGAACTCAGAGG | 1325 |
| hs132683964 | GTAGACATCTCACTGCTCATGGG | 1326 |
| hs132683585 | GAAAGAAGTGGCGTTTGCAGTGG | 1327 |
| hs132683924 | ATACAAAACAAAACATGAGAGGG | 1328 |
| hs132685426 | GTCTATTCATTCAGGCTAAGGGG | 1329 |
| hs132684351 | TGTATTTATAAACAACCCTAAGG | 1330 |
| hs132693233 | TGGGGAGAGGAATTGGTAAGGGG | 1331 |
| hs132693474 | TCTTGTACATCTTAACCTCAAGG | 1332 |
| hs132688930 | TAGCCACCTTCTGTATCAGAAGG | 1333 |
| hs132692993 | TTCCGATGATCCTTTAACTGTGG | 1334 |
| hs132690646 | ATGAAGAGACAAGCTTTCCAGGG | 1335 |
| hs132690259 | GCATTGAGCACACTCTACAAGGG | 1336 |
| hs132689772 | CACAGGAGCTCTAAGTCCAGTGG | 1337 |
| hs132694199 | GGAAAACAAGGTAAAGTGAGTGG | 1338 |
| hs132690050 | GGTGACCACAGTTTAAAGAAGGG | 1339 |
| hs132690729 | ACGGTGTTATCTTTAAAACCTGG | 1340 |
| hs132685909 | GACAAGCAGAACAATTTCAAGGG | 1341 |
| hs132684783 | CTAAGGGAACATCTTGCTGTAGG | 1342 |
| hs132691951 | TGGATCAGAATTGAAACTGAGGG | 1343 |
| hs132690190 | AAGATGTGAGCTATAAAAGAGGG | 1344 |
| hs132694137 | GCCTGAAATTGGTAAGAGGACGG | 1345 |
| hs132685661 | CAAGTTTCCTCCCTAGAGGAGGG | 1346 |
| hs132694062 | TATGTTGCAATTTGAAGACAGGG | 1347 |
| hs132686612 | AATTCCAAGGGACTTTTGAGGGG | 1348 |
| hs132683829 | GATACAGTGAATTCACAGCTTGG | 1349 |
| hs132685242 | CTGTTCAGTAAGTGTCTGCAGGG | 1350 |
| hs132693528 | AAGTCAACAACATACATGGATGG | 1351 |
| hs132687657 | TCTTGTGCGTGCTAAAGCATAGG | 1352 |
| hs132690119 | CAAAACAAAAGCCAAGAAGAGGG | 1353 |
| hs132688191 | TGCCCAGTGGTGGGTCAGAGGGG | 1354 |
| hs132690494 | CCAAAATTGATAGAAAACATTGG | 1355 |
| hs132690226 | TAATATGCTGTAATATATGAGGG | 1356 |
| hs132691254 | GATAATATCAAAGACTCTTGGGG | 1357 |
| hs132688099 | GTCACTACTAGAGTATGCACTGG | 1358 |
| hs132692564 | GCCATAGGCCATCTCCATAGTGG | 1359 |
| hs132693079 | CACCTCTTCAAAATAGTGTGTGG | 1360 |
| hs132683546 | ACACATATGTATATATCAGAAGG | 1361 |
| hs132692847 | TTTCTATAATCTATTGCCAAGGG | 1362 |
| hs132685169 | ATAAGAACATACATAGCCAAAGG | 1363 |
| hs132685305 | GCTTTGTGAAACAATTGGCAAGG | 1364 |
| hs132690962 | ACTCCATCAGAGAGTTCTGTAGG | 1365 |
| hs132687560 | AGGATAGCTTACTTATACAGGGG | 1366 |
| hs132690532 | CTTTGTTACATTTAGAACCACGG | 1367 |
| hs132688246 | TTTTCCCACTTCATAGACACGGG | 1368 |
| hs132693371 | ATGAAGTTCTACATTGAACTGGG | 1369 |
| hs132683473 | TTTAAATGATATTTCCTTGGGGG | 1370 |
| hs132687076 | CAGAAGTTACTGACTTGAGGAGG | 1371 |
| hs132683755 | TCTGTACTAAGATCGGTGACAGG | 1372 |
| hs132690683 | TAATACAAAGAAATTGCAAGTGG | 1373 |
| hs132685694 | TGAGAGATGAGCAAATAGCCTGG | 1374 |
| hs132690953 | GGGCTGAAGCCCATGCTGAGGGG | 1375 |
| hs132686673 | TGAACAGGAGGTGGATCGAAAGG | 1376 |
| hs132694103 | TTCAGGAAAATATAAGTCAGAGG | 1377 |
| hs132688577 | TTTAACATCAGAAAGAACGTTGG | 1378 |
| hs132688277 | ATAGAGAATTTTTAACACCTAGG | 1379 |
| hs132683580 | GTGGAGGCAAAGGAACAGACAGG | 1380 |
| hs132690431 | TCAACACAGTAACTGATGCCAGG | 1381 |
| hs132685374 | AGAACTCTGCTCAAGCTGAAAGG | 1382 |
| hs132684474 | CACATAATAATACTATCTAAGGG | 1383 |
| hs132689489 | ATAAACAAATACATATCTAAGGG | 1384 |
| hs132685648 | TGTTTGTTGCCAGGAAACACAGG | 1385 |
| hs132686409 | ATTTTGGTAAAATATGGTGAAGG | 1386 |
| hs132693460 | GGAGCTTGCAAAGGGACTGTAGG | 1387 |
| hs132689816 | TTATTGTTGGCTTTAAAAGGGGG | 1388 |
| hs132686476 | TAGAATAAATCTGAGCTAGGAGG | 1389 |
| hs132690503 | ATCTCATACACCTTTTGCTGGGG | 1390 |
| hs132685666 | CCAAAGCCAGTTTACTTCTGGGG | 1391 |
| hs132688364 | CTCTTACTCATAGTGATAAGGGG | 1392 |
| hs132688935 | ATTGTTCTGATAACCCAAGAGGG | 1393 |
| hs132687063 | AAGTTCCATGTCCTAGCTCGAGG | 1394 |
| hs132693813 | CCCAATTGTACTGTGCAGCATGG | 1395 |
| hs132690017 | TCATTAAATTGGAGATCGAAAGG | 1396 |
| hs132684265 | GGAGCTTCCACTAGGCCAGAGGG | 1397 |
| hs132689997 | TACAGTAGTCAGTTGAAATGGGG | 1398 |
| hs132685451 | TAGCTGGTAGATTAAAGCAAAGG | 1399 |
| hs132692962 | TTTCAAATAGAAGCTAAGAAGGG | 1400 |
| hs132685662 | ACAAGTTTCCTCCCTAGAGGAGG | 1401 |
| hs132688106 | GTATGTGCTAGCGTGGATGATGG | 1402 |
| hs132689154 | ATTTCTGGTTCATATAAAGGTGG | 1403 |
| hs132685979 | CCCTTTCACTGGTATTAGGGAGG | 1404 |
| hs132692447 | CTGAGGGTGGGAAAATGCCATGG | 1405 |
| hs132685112 | TTTATACTAACTATGGGTGGGGG | 1406 |
| hs132689054 | AACACTATCTGGCTGCCTGAGGG | 1407 |
| hs132689850 | GTCTATCACTCAAGGTACAAAGG | 1408 |
| hs132692308 | GTGTAGAAACCATTCTGCCAGGG | 1409 |
| hs132683353 | TTATTCACCCTTGTCAACAAAGG | 1410 |
| hs132685954 | TATTATTTTTTACATTCTGGAGG | 1411 |
| hs132692947 | CTATCCTAATAAGCAGGGGATGG | 1412 |
| hs132693977 | TCAGACCTCAGAGGTTACAAAGG | 1413 |
| hs132690669 | CAAGGAAGTTCAGAGATGTAGGG | 1414 |
| hs132684058 | GTACTCAATCCTTTGATGGAAGG | 1415 |
| hs132692428 | TGAGAGAGGCCAGACTTGCAGGG | 1416 |
| hs132687702 | GAAATGTGTACAAAGTTAGGAGG | 1417 |
| hs132693587 | ACTACATCCATAATCAGAGAAGG | 1418 |
| hs132689560 | TCACATTCCAAACCCAGCCTAGG | 1419 |
| hs132687538 | TGTTAATTGGAGGTTGACAAGGG | 1420 |
| hs132687015 | TTATATGCTTTGATCAGATGGGG | 1421 |
| hs132684780 | ATCTTGCTGTAGGCAGCCTGGGG | 1422 |
| hs132686192 | CCACTGTTCATTTTAACTGGGGG | 1423 |
| hs132694312 | AAAGTAACATTGGCCAAAGAGGG | 1424 |
| hs132687041 | TTTCATTTGGAGAGAACAGGAGG | 1425 |
| hs132683543 | TTGATTGATAAGTTATGCCAGGG | 1426 |
| hs132686130 | AGAGGAGATATTACCCCAGAAGG | 1427 |
| hs132693234 | TTGGGGAGAGGAATTGGTAAGGG | 1428 |
| hs132694202 | CTACTGAAATCATACACTAACGG | 1429 |
| hs132689394 | ATCATACTCTAATTCACAGAAGG | 1430 |
| hs132694154 | TTAGGAATATGGAGCAATGAGGG | 1431 |
| hs132692514 | ATTTAAACCACAGTTCTCAAAGG | 1432 |
| hs132684155 | TATTCCCTTCTCAACAGCCTAGG | 1433 |
| hs132694214 | TGCAGCCTAACAGATAAAGATGG | 1434 |
| hs132694039 | TGATGGACACATTAGTGAGTAGG | 1435 |
| hs132691773 | TTGAAGATGGGCGCTTCCAAAGG | 1436 |
| hs132689168 | TTTCACAGCAATACATTTTGGGG | 1437 |
| hs132692997 | TACCACAGTTAAAGGATCATCGG | 1438 |
| hs132693584 | AATGTATTAGTACTGTTGTGTGG | 1439 |
| hs132687576 | ACTTAACAATTATTATCTAGGGG | 1440 |
| hs132694037 | CTAATGTGTCCATCACATGCAGG | 1441 |
| hs132691666 | GACCATCTCTACATACAGAATGG | 1442 |
| hs132685513 | ACATCTAAGATATCCCAATACGG | 1443 |
| hs132684033 | TTACGCCTTTTAGAAGAGGAGGG | 1444 |
| hs132689696 | TATGCAAATTAATTTTTCAGTGG | 1445 |
| hs132688740 | TTTTTGAAAGAAGGACTAGTCGG | 1446 |
| hs132688221 | TCTGAAGACTGGCTAGACTAGGG | 1447 |
| hs132685293 | GGAGGTATTGTACTTTGCCAAGG | 1448 |
| hs132694418 | CCAAAATCTAACGCAGCACAAGG | 1449 |
| hs132690800 | GGAGAGAGAGACATGTACCTTGG | 1450 |
| hs132686743 | CTTTTGGTTAAAGAGTAATGAGG | 1451 |
| hs132688389 | TTGCAAATTGTTATAGACCAAGG | 1452 |
| hs132689132 | CCATATGTCATTATTAGCTGCGG | 1453 |
| hs132692745 | GTCTTGTGCAGTATTAGTAGTGG | 1454 |
| hs132684940 | GATATTGTAGGCATATTCGATGG | 1455 |
| hs132684358 | TGCCTACCAAGAGAAGAAGAGGG | 1456 |
| hs132693443 | TCTGCTCAGATCATTCAAAAGGG | 1457 |
| hs132685447 | ACTCAATTAACTATTCAGACTGG | 1458 |
| hs132693651 | CCACAGGGACAGAAGTAAGCGGG | 1459 |
| hs132688891 | AAGTGATTACACCTTGTACTGGG | 1460 |
| hs132686652 | ATACCTACTCCTCTTTGCTAAGG | 1461 |
| hs132691599 | TATCTGAGCTGTTACAAAAGTGG | 1462 |
| hs132691655 | GGGTTTCTGGAGACCGAGAAGGG | 1463 |
| hs132692585 | TCTACATCACGATAATATGTTGG | 1464 |
| hs132684836 | TAACTTCCATTGCCTATCAGTGG | 1465 |
| hs132687924 | GTCTTCTTTTAAAAATACAAAGG | 1466 |
| hs132683411 | GGAATTATCATCTCAGCCGCAGG | 1467 |
| hs132692220 | CACTTGCTCTTCCTTGCGGTAGG | 1468 |
| hs132684957 | ACCTGTTTACTACAAATCAAAGG | 1469 |
| hs132690772 | TTTTAAGGCATTCTGTAGTGAGG | 1470 |
| hs132691417 | TTTCTCGTGTTCAAGAGGCATGG | 1471 |
| hs132685624 | TATTTATTATAGGATGTGAAAGG | 1472 |
| hs132684812 | ACCCACATCAGTAGAGGGCATGG | 1473 |
| hs132684961 | GCTGACACAACTTTGTCCCCAGG | 1474 |
| hs132684588 | TTAAATTCAAGTCTCTCGAAAGG | 1475 |
| hs132689457 | CAGCAGTCCTCAGTAACTCAGGG | 1476 |
| hs132685396 | ATGTATGTGTGCGTGTACATAGG | 1477 |
| hs132693939 | ATACAGGTTTAAATATTGCATGG | 1478 |
| hs132686762 | TTCGGAACACAGTTGAGAGAGGG | 1479 |
| hs132694359 | AATAATCTTTATCACCACTAGGG | 1480 |
| hs132685977 | AGGGAGGAGATATCAAAAGATGG | 1481 |
| hs132691242 | CTGAGGACTAGATGGCAGAATGG | 1482 |
| hs132688158 | ATATGACTGAACTTAAAGGCTGG | 1483 |
| hs132684968 | TGTTCCTTCCAGAGGTGTGTGGG | 1484 |
| hs132689594 | TACACCTGCTTTTAGAACAGTGG | 1485 |
| hs132693507 | ATATAATTGAGAATTAGTGCAGG | 1486 |
| hs132692078 | ATAAGGACCAGAAGGTGAAGTGG | 1487 |
| hs132687759 | GAGTATTGTGTTACTAGTAGAGG | 1488 |
| hs132690847 | TTTTAATATCTAATTCAACATGG | 1489 |
| hs132685184 | ACTAATCTTAGGAAGCTGGCTGG | 1490 |
| hs132685159 | GGAATTTTACACCAGGTCGAAGG | 1491 |
| hs132692616 | GCCTGTCAGCGATACTACCTGGG | 1492 |
| hs132692323 | ATACCAGGAATCTCAGTCATGGG | 1493 |
| hs132687686 | TAGAGGGCTGATAATAACCTTGG | 1494 |
| hs132689604 | GCATCTTGAATTTTTAAAGGAGG | 1495 |
| hs132685421 | ATATTGACAAGGGAATGAAATGG | 1496 |
| hs132694182 | AATTCTAAGCATAAAGCTGAGGG | 1497 |
| hs132693375 | CCACAGATATATTCCTAGGAGGG | 1498 |
| hs132687676 | TTAACGTTATAATTTTTACAAGG | 1499 |
| hs132689007 | AAAAGCTTCGGCTTCATACGTGG | 1500 |
| hs132693831 | GGTATGATAGTTACCCTACATGG | 1501 |
| hs132690230 | AGAGTTACTCTCCCATTCGAAGG | 1502 |
| hs132683888 | TTTCCATCTCTCATTCAGATGGG | 1503 |
| hs132691223 | TGAATCCTGCTTTTTCAAGGTGG | 1504 |
| hs132692200 | ATCAGTTCCTCCACAACATGTGG | 1505 |
| hs132683662 | ACAAAAAAAAAAAAAAACAATGG | 1506 |
| hs132689243 | CGGATCATGATGAAAGCCACAGG | 1507 |
| hs132690289 | TCAAACTCAGTTAATGGAGGCGG | 1508 |
| hs132683376 | TTTGAAGTGATTTAATCTAGAGG | 1509 |
| hs132689977 | ATAAAAAGCAAAGAGAACATAGG | 1510 |
| hs132692306 | AATTAGTCTATAGGATAAGGTGG | 1511 |
| hs132693154 | AGACAGAGTCTGGGTCCCCATGG | 1512 |
| hs132692531 | GAAAACCATATACAAAGCATAGG | 1513 |
| hs132687910 | CATTCAAAAATACATGAACAGGG | 1514 |
| hs132692892 | GATAGGAGAATATAGACTGTAGG | 1515 |
| hs132694045 | TGAAATTGTATGGGTTTTAGGGG | 1516 |
| hs132684825 | TATATACATAATATAAGCCATGG | 1517 |
| hs132692798 | AAACAGGGTTTAATAGGTGAGGG | 1518 |
| hs132684172 | GAATAGGAAAAGAACAACTAGGG | 1519 |
| hs132686027 | TGCTTTTCAAAGGTGTGTGGAGG | 1520 |
| hs132693557 | TTAATAAAGTTTCTACAGAAGGG | 1521 |
| hs132688387 | TTACTGGAGAACCATGCAGTAGG | 1522 |
| hs132685074 | CTAAGATAAAATGTGACAGTAGG | 1523 |
| hs132688875 | CTCGAGAAGCCGCAAAACCAAGG | 1524 |
| hs132688404 | CTACATTGGCTAAGGAGCCAAGG | 1525 |
| hs132686707 | GAAAACTTATACATTTAAGTGGG | 1526 |
| hs132683515 | AATAGAATTAATATCTGCAGAGG | 1527 |
| hs132687551 | AATCTATTAAATGAAGTCCTGGG | 1528 |
| hs132684202 | TCTATGAATTTGCTATGCACCGG | 1529 |
| hs132684625 | CTGAATATTCTATCAAAGCAAGG | 1530 |
| hs132684648 | CCCTTGATCTCTGCTCAAAGAGG | 1531 |
| hs132690865 | TTCTGGAAAACTTAGCACGTTGG | 1532 |
| hs132690030 | TGTATTTTTATGTAGCGCGTGGG | 1533 |
| hs132686023 | TGCCGTGCTACTTAAGAGAAGGG | 1534 |
| hs132691871 | GAAATATGTCAAACAACTGGAGG | 1535 |
| hs132690523 | CTCACAGTGCAAGATACAAAGGG | 1536 |
| hs132692128 | TGAGGACGTGTGCAACGGGATGG | 1537 |
| hs132685348 | TAACACCTGCTGCTATGAAGAGG | 1538 |
| hs132688135 | TACACGAAACTGATGTCCAATGG | 1539 |
| hs132684423 | TTCTTCCCCACAGACCACATTGG | 1540 |
| hs132691625 | ATGTAACCATGCTTGACGCTAGG | 1541 |
| hs132690885 | ACTTGGGCTCTTAGAAAGTAGGG | 1542 |
| hs132687725 | AGTTTTCACAGAGAGCAAAAGGG | 1543 |
| hs132685541 | TAATTGTTATCAGTTGTACAAGG | 1544 |
| hs132692014 | GCCTATGGAACAATACATGTTGG | 1545 |
| hs132693839 | GCATTTCCCTAAACTGAATGAGG | 1546 |
| hs132687887 | TCCTGATTGTGGGAAATCAGAGG | 1547 |
| hs132684874 | AAATGAATAATCTTTTGCTAGGG | 1548 |
| hs132684157 | TCATCCTAGGCTGTTGAGAAGGG | 1549 |
| hs132685914 | TTTATATTAATAATCAAGAGTGG | 1550 |
| hs132687193 | TACTCAAGCACCTTTGTGCAAGG | 1551 |
| hs132687619 | TGTTCTTGCTATAAAATGTGTGG | 1552 |
| hs132689892 | TACTTCACTTGAACTTAGCAGGG | 1553 |
| hs132684746 | GTGCAAAATATGTTTGGCAGGGG | 1554 |
| hs132692561 | GTAGCATACCACTATGGAGATGG | 1555 |
| hs132689882 | AACTTACCACATAATCCGACTGG | 1556 |
| hs132687888 | CCTGATTGTGGGAAATCAGAGGG | 1557 |
| hs132689352 | AGTCAATGCTTATATGGGAAAGG | 1558 |
| hs132691804 | GCTTTAATAAGAGAAACCTCTGG | 1559 |
| hs132683893 | CTCTATATCTGCAAACTCAAGGG | 1560 |
| hs132688355 | ATTTGTATTAAGCGAAGCCATGG | 1561 |
| hs132691923 | ATCTTATGACACACCACCCTAGG | 1562 |
| hs132692077 | TAAGGACCAGAAGGTGAAGTGGG | 1563 |
| hs132689115 | GTTAATTTATTTCAGGAACATGG | 1564 |
| hs132690760 | ATGAAAACTTAGCCTTGCCATGG | 1565 |
| hs132687142 | TGTATGCTTACACTGTGTGTGGG | 1566 |
| hs132693418 | AAAATTGTACCACCAGTACAAGG | 1567 |
| hs132686901 | AAGTTTTTAATCAAAGAAGACGG | 1568 |
| hs132688421 | TCTAGCACAACAGGGTCCACAGG | 1569 |
| hs132691938 | GGCAGGTCCTAGTTTACCCTAGG | 1570 |
| hs132690375 | CCACAAGTCAAAGATGGGTGGGG | 1571 |
| hs132688888 | GATGAACAATCCAGATATAGGGG | 1572 |
| hs132691921 | CTAGAATGACTCTCAGCCTAGGG | 1573 |
| hs132692118 | ACTTAACTCTCTGTTGTGAGGGG | 1574 |
| hs132690322 | AGCAAATGACATGGAGTACAGGG | 1575 |
| hs132692609 | ATAGCTCATTAGCTCAATGAAGG | 1576 |
| hs132689208 | ACAAATAGCTGAGAGTTGGTGGG | 1577 |
| hs132693752 | AATGATGTCAACCAGTAGGATGG | 1578 |
| hs132687080 | AAGAAATTAGCTCTTGGCCAGGG | 1579 |
| hs132688832 | CACTGTGTTGGAAAATAAGAGGG | 1580 |
| hs132684261 | AAACGAAAGGAGCTTCCACTAGG | 1581 |
| hs132686993 | TTCTTCTCCTAGCATCACACAGG | 1582 |
| hs132685403 | GAGCTGTCAGTCATAGTGCTGGG | 1583 |
| hs132689179 | CATATCTTGTAAATATACTAGGG | 1584 |
| hs132692280 | CCTGAAAGCAAAATAAAATGTGG | 1585 |
| hs132693207 | AGTTGGGCAAAGACTGGGGTAGG | 1586 |
| hs132683739 | GAGAATACAAAAGAAATCCTGGG | 1587 |
| hs132693802 | CATACTGAAGGATTTGGGGTTGG | 1588 |
| hs132688258 | ACAAATACATAAATTTGGCAGGG | 1589 |
| hs132684152 | TTACCTGGCAGCCCACCTCATGG | 1590 |
| hs132687166 | ATCTTCACAAGCCCTTGAAGAGG | 1591 |
| hs132688336 | CTGAGGGATTGGAAGAGTCAGGG | 1592 |
| hs132687808 | TTTCAAATATCATTACTCCCTGG | 1593 |
| hs132689095 | TGTTGTATCTCTGTTCGTTGTGG | 1594 |
| hs132693814 | TCATCACTAATAGAAAATGATGG | 1595 |
| hs132692398 | ACACTACAATCATATATATGTGG | 1596 |
| hs132686523 | AGATCCCCCCATTACACTTGTGG | 1597 |
| hs132687466 | AGAAAGAAGTAGCAAATGCAAGG | 1598 |
| hs132686473 | TTCAAAATAATGAGCACTAGAGG | 1599 |
| hs132693798 | GCAGAGTACTACTGAAGTTGAGG | 1600 |
| hs132693192 | AGTATAAATCAACTGCGCATTGG | 1601 |
| hs132691934 | AGATTACACATGTTGTTAAGGGG | 1602 |
| hs132685097 | GTTCTTACTTCGTAGAATGGTGG | 1603 |
| hs132691493 | TTAATAGAACTAGAGAATCAGGG | 1604 |
| hs132692880 | TCAGACAGTGATGTTTCATGTGG | 1605 |
| hs132683889 | CTTCCCATCTGAATGAGAGATGG | 1606 |
| hs132687430 | GGGAGAAATGAGTAAAAATGTGG | 1607 |
| hs132687525 | AATTTCTATGAATTTCAAGTGGG | 1608 |
| hs132687115 | ACAGGGACTCTCTTCTAGTAGGG | 1609 |
| hs132693200 | GCAAGGACATGTAGGAAGGAAGG | 1610 |
| hs132688312 | ACAGTGAGAGTTGGATAGAGAGG | 1611 |
| hs132685267 | TCATATGTTCACTAGTACTGAGG | 1612 |
| hs132683315 | AAGGAATAATCATTTCTCCATGG | 1613 |
| hs132692223 | AGGATTTGTCAATATTCCAAGGG | 1614 |
| hs132694226 | ACATACTTTTCAGATAACATTGG | 1615 |
| hs132684871 | CAGGAAAAGGGGTTCAAGAAGGG | 1616 |
| hs132693866 | TTCAGCCAAAAGTAAAGAAGAGG | 1617 |
| hs132688304 | GGCACAGTAAGCCTTTGGATGGG | 1618 |
| hs132684985 | TTTTAAGTAAAAGGGACACCTGG | 1619 |
| hs132686637 | GGATTTAGTGTCAGATATGGAGG | 1620 |
| hs132691701 | CTATGGCACCTTCAGTGATAGGG | 1621 |
| hs132686562 | ATCCTGGCAGAAAACTATGCTGG | 1622 |
| hs132690520 | TATTGTACCTCACAGCATAGAGG | 1623 |
| hs132694006 | TTTTCCACATCACTCACACTAGG | 1624 |
| hs132684052 | AGGTAGAAGCCACTGAGAGAGGG | 1625 |
| hs132690184 | ATCACTCGTTCAAAATACTTGGG | 1626 |
| hs132685179 | AGGTAGCTAAGTATTAGGAAGGG | 1627 |
| hs132686083 | ACTATAACCTATGGATAGGATGG | 1628 |
| hs132691907 | ATATTGGAACTTACTCTGCTAGG | 1629 |
| hs132693974 | GGTTACAAAGGAGGGCTGAAAGG | 1630 |
| hs132689105 | CCTAGTATCTTGATAACCCCAGG | 1631 |
| hs132692802 | CTTTTATATGTTTAGCCTAGAGG | 1632 |
| hs132691606 | TCATGCATATGATTACAGAAAGG | 1633 |
| hs132684387 | ATAGTGCCCAACCAGAGCAAAGG | 1634 |
| hs132687103 | CTGTGACGACGATCATTGGTGGG | 1635 |
| hs132690982 | AAGAGAATTACGTTAAGGGATGG | 1636 |
| hs132684582 | AATACTGTAGGTTAAGAAAGTGG | 1637 |
| hs132694196 | AAACCCACGAAGAGAGAAGAGGG | 1638 |
| hs132691555 | TGGACAAGATTGAGGAACAAAGG | 1639 |
| hs132691151 | AGGATGGTATCAGGTTAGCTTGG | 1640 |
| hs132691572 | TCATATTTAACAAATCTAAGTGG | 1641 |
| hs132686074 | TAACATGAAAAAATTGGTAGGGG | 1642 |
| hs132688053 | TTGTTATTAGCCACAAATCAGGG | 1643 |
| hs132687935 | TAGAACAAAGTGGCAGGCATGGG | 1644 |
| hs132692094 | AGACCACCCTAAAAATCACCAGG | 1645 |
| hs132685041 | CCTTAAAATGTTAAGTACTGAGG | 1646 |
| hs132686645 | GATCAGTCAGAGTCCAGGCTTGG | 1647 |
| hs132683368 | GCACATGTAGGAAATATAAGTGG | 1648 |
| hs132691113 | TAGTATCATAATCTTTACCATGG | 1649 |
| hs132685485 | TTATCTGTATACAAATTCACCGG | 1650 |
| hs132692028 | TTTCTATCACAGATTTACATGGG | 1651 |
| hs132687457 | AAGCACTGAGAATTAGGGATAGG | 1652 |
| hs132690172 | ATCCAGACTACTAAGAACATTGG | 1653 |
| hs132691609 | AGTATTGACAGTCTGACCATGGG | 1654 |
| hs132694072 | TGAGCAAACGTTTATAGAGGAGG | 1655 |
| hs132688475 | CAAGGGCATCAAGTAAGAAGAGG | 1656 |
| hs132692409 | GAAAGAAACTTAACTAGCAGTGG | 1657 |
| hs132692728 | AGATGTATTTTTAAGCTAGGAGG | 1658 |
| hs132693182 | GGATGAGTAACTTTTGAAGGAGG | 1659 |
| hs132691642 | ACTCCGTTACACGTTTACAAAGG | 1660 |
| hs132685175 | GGTTAAACGGAAGCAAAAGTAGG | 1661 |
| hs132689488 | TTATTGTTCTAGCAGCAAGAAGG | 1662 |
| hs132694331 | TCTGTTTTGAAAAATAGTCAAGG | 1663 |
| hs132689800 | TTACAATATATTGAGTACACTGG | 1664 |
| hs132691632 | ACACCTGTCATCTCAAAAGAAGG | 1665 |
| hs132688769 | GCTCATTTAGGTAGTTTGAGTGG | 1666 |
| hs132690903 | TTGAACTCCTAATTAGAGGATGG | 1667 |
| hs132687664 | CCATATTCTTAAGACAACTTGGG | 1668 |
| hs132684834 | CCACATCCACTGATAGGCAATGG | 1669 |
| hs132689460 | AACAGACTCTTAAGCAGCAGTGG | 1670 |
| hs132687915 | TGAAACATATAAGTTATGACAGG | 1671 |
| hs132687627 | AGTGTAATCTAGCACAGCAATGG | 1672 |
| hs132690894 | CTTTTCATGACTCTATCTGGTGG | 1673 |
| hs132691985 | GTGACTAGAAAATCTGAACTAGG | 1674 |
| hs132693727 | AGAGAATAAAAGGCCCAGAATGG | 1675 |
| hs132692670 | ACAGTGCCTAAAGTCGAAAAGGG | 1676 |
| hs132691827 | AATGCGAAGCCACTACCCATGGG | 1677 |
| hs132692099 | TCACCAGGGCTGAGAATAGGAGG | 1678 |
| hs132691581 | TTACATTTCTAAATAAATGTGGG | 1679 |
| hs132690220 | ATGAAATACTTTAACACCCAGGG | 1680 |
| hs132687334 | ATATACCGCCTATAGTTGATGGG | 1681 |
| hs132686616 | AGATAGCTAGGCTAATTCCAAGG | 1682 |
| hs132693695 | CATTAGCTGCTTTCTAGCTGAGG | 1683 |
| hs132693946 | CAACACATACAATAAATGTAGGG | 1684 |
| hs132690416 | TCAAACTTTATTGCTCCAGTAGG | 1685 |
| hs132689250 | ATTAGTTCCTTTACTCAACAAGG | 1686 |
| hs132691880 | ATATAACACAGAAAGTAAAAGGG | 1687 |
| hs132688724 | GTGAGTAACTAGAAATGCATGGG | 1688 |
| hs132683830 | TTCACTGTATCTATGCAGAAAGG | 1689 |
| hs132693221 | AATTAAACTCCAATATATTGAGG | 1690 |
| hs132694124 | CATAATCACTGAGCTTCTCAGGG | 1691 |
| hs132688226 | AGATGAATGTGATTTAAATGGGG | 1692 |
| hs132684845 | GTTACATTTTCTATGACTAGAGG | 1693 |
| hs132687305 | AGAATGAAAATCTATCTGGTTGG | 1694 |
| hs132688820 | GGCTTAATAGAAGATCAGTTGGG | 1695 |
| hs132688892 | GATTACACCTTGTACTGGGATGG | 1696 |
| hs132692529 | ATTGTGTTCAAAATTTACACTGG | 1697 |
| hs132691942 | CCAACCAGCAAAATAACCCTAGG | 1698 |
| hs132690731 | TTTATAGTAGGCAGTGCATACGG | 1699 |
| hs132684046 | GAACAGGCGGGTCCCATGGGTGG | 1700 |
| hs132690925 | ATCGACTCTTGGAATGGCAGCGG | 1701 |
| hs132693170 | TGGTTCCAGTGAGATACAGCAGG | 1702 |
| hs132684424 | GGAAGAAGATCTTTGCATGCAGG | 1703 |
| hs132688386 | TACTGGAGAACCATGCAGTAGGG | 1704 |
| hs132688948 | GCCTTGTAGTTATCCCACATGGG | 1705 |
| hs132691092 | ATATGTGCTCAAGTGAGTACAGG | 1706 |
| hs132693315 | TTTGATGGAAGTATGAGTAAGGG | 1707 |
| hs132690547 | ACAATAACTGGAAAAGTGAAAGG | 1708 |
| hs132687368 | GTGTTTTAAGAAGATATATGTGG | 1709 |
| hs132693505 | TATAATTGAGAATTAGTGCAGGG | 1710 |
| hs132686420 | GAAATTGCTAATACAATGGACGG | 1711 |
| hs132691911 | CAAGGATAGGACTTTATCCATGG | 1712 |
| hs132690305 | GGGTATAAAGTTTCCTAAGAGGG | 1713 |
| hs132691477 | TTATGAGTCAGTTTGAAATGAGG | 1714 |
| hs132692081 | TGAAAAAAATAAGGACCAGAAGG | 1715 |
| hs132687322 | TGAGAAAAGCTTAAAGCTAACGG | 1716 |
| hs132689449 | GAGGGCAAAAGAACTGTAGACGG | 1717 |
| hs132686813 | GCTTTTGATGTATTCTAATGGGG | 1718 |
| hs132686208 | ATATGAGGAAATAGATCACCAGG | 1719 |
| hs132686176 | ACATAACAGACTCCTTTCACAGG | 1720 |
| hs132691821 | ACAGACTATTTTCCCCCCATGGG | 1721 |
| hs132685258 | CCAGGCAAAGAAAGAAGAGATGG | 1722 |
| hs132684195 | TTAAGACTCATTCAGGACTCAGG | 1723 |
| hs132692332 | TTTTCCAAACGTTTATAACAAGG | 1724 |
| hs132688051 | GTAGAGCTGTGTGAATCCATGGG | 1725 |
| hs132693465 | GTAAACATCATCAAGGCAGATGG | 1726 |
| hs132693381 | GTAGTTAAGGTACTAAAGTAGGG | 1727 |
| hs132689229 | GCAGGAAGTTGGGAGGCTGGTGG | 1728 |
| hs132690231 | GAGTTACTCTCCCATTCGAAGGG | 1729 |
| hs132689790 | AAAGGAATCCCCACAAATTGGGG | 1730 |
| hs132688695 | AAAAATCATATACATAGAAGTGG | 1731 |
| hs132685425 | TCTATTCATTCAGGCTAAGGGGG | 1732 |
| hs132689839 | ACAAGCGCTAGAAGTTATGCTGG | 1733 |
| hs132688606 | ATGATCTCAGAGTACTACATTGG | 1734 |
| hs132683405 | TACTGGTAGCAGAAAGAATGAGG | 1735 |
| hs132691685 | TCACCGTGATTACTAATGGATGG | 1736 |
| hs132685725 | TTTTAAACGTCCTTTTGTAGAGG | 1737 |
| hs132692972 | AAGGCCTAGTGAGGAAAGATGGG | 1738 |
| hs132693749 | ACTGGTTGACATCATTACGTTGG | 1739 |
| hs132686039 | GTACACGTTGTCTTTATGAAAGG | 1740 |
| hs132686655 | CATCTGATGCCTTAGCAAAGAGG | 1741 |
| hs132690733 | GCACGAATGTCAGTGTCGTATGG | 1742 |
| hs132688704 | TGCATTTTATTAAATTAGAGTGG | 1743 |
| hs132689814 | ACAATAAGTAAGCTTGTGAAGGG | 1744 |
| hs132688812 | TGGGGTACGATACAGTGTAAAGG | 1745 |
| hs132691955 | CTCCTTCGTTATGAATCTGGAGG | 1746 |
| hs132690243 | ATTATTTTACCAAGTTTGGAGGG | 1747 |
| hs132687748 | AAGTTGAAATACGTTCACTAAGG | 1748 |
| hs132694115 | GTATTTCGTAAGAGGATGCTGGG | 1749 |
| hs132686875 | CACACGTTTTTAATTTAATGCGG | 1750 |
| hs132692850 | ACCAGAAAAGAGTTAAAGCATGG | 1751 |
| hs132688325 | TGGAGATGAAGCCCTACACTAGG | 1752 |
| hs132686983 | GACGACACAGTTATTTCTAGAGG | 1753 |
| hs132689340 | GGAGAGCCTACATGTAGCCTAGG | 1754 |
| hs132686214 | AATCACATTTGATGTTGTAAGGG | 1755 |
| hs132688308 | TAATTACCTTCCCCATCCAAAGG | 1756 |
| hs132693917 | TTATCCCTAAGACCTATGTATGG | 1757 |
| hs132686682 | CACTTAAGATGTTAGAGGGAGGG | 1758 |
| hs132688864 | GCATCTTCTGTGACTATGCAGGG | 1759 |
| hs132688292 | TGATAAAAATTATTGAAAAGGGG | 1760 |
| hs132693251 | TGTTCCTTAGTATTGAGGGAAGG | 1761 |
| hs132689505 | CCATACCTAACCTCCATTGGCGG | 1762 |
| hs132687143 | TGTGTGGGTTTTTATGCCTGTGG | 1763 |
| hs132690301 | CTGACAACACAGAACGAACCAGG | 1764 |
| hs132684191 | TGTGTGTTTCAGAGTTGGGATGG | 1765 |
| hs132683322 | ATACGTGCATGCTTTAAGGAAGG | 1766 |
| hs132692553 | GGCTGACTGGACCAAGATTGAGG | 1767 |
| hs132689721 | TATTATAAAAGCAGGTCAGAGGG | 1768 |
| hs132686789 | TCCTACAGACAATTTTGCCAAGG | 1769 |
| hs132693736 | TATATTTGAGGAAATAATGAGGG | 1770 |
| hs132687745 | GGCTGACACAATCATAAGCATGG | 1771 |
| hs132691863 | TTTCATCTAGACTGAACTCATGG | 1772 |
| hs132685279 | CCTAGTAGATTGTAAGGCCAAGG | 1773 |
| hs132693050 | AGTATTTTGCATGAAGCCAAAGG | 1774 |
| hs132688723 | TGTGAGTAACTAGAAATGCATGG | 1775 |
| hs132683614 | GTTAGATACAATGCAGGCCGGGG | 1776 |
| hs132689367 | ATTAGCAGTAGATGTATCTAGGG | 1777 |
| hs132689910 | CTAGTGTATGAGATTAGATGAGG | 1778 |
| hs132690724 | CTTTTCTTTTAATATACCCAAGG | 1779 |
| hs132688653 | ATATTAAAGATTGAAGTCAATGG | 1780 |
| hs132686654 | ATGCCTTAGCAAAGAGGAGTAGG | 1781 |
| hs132685688 | GTATGTGCATTAGAGAGCTATGG | 1782 |
| hs132691273 | TCCTTTAAGTAAGACAGCCAGGG | 1783 |
| hs132692376 | GCTAGAGAAGGTCAGAAGAAGGG | 1784 |
| hs132684153 | ATGAAGCCTTCCAATTTACCTGG | 1785 |
| hs132693301 | GCATAAAATCTACCAGTAGGTGG | 1786 |
| hs132683541 | AAGATCTAGGTCGAATGTGAGGG | 1787 |
| hs132693766 | GATATAACCACAATCAGAAGTGG | 1788 |
| hs132691030 | GGAAACAACTTGAAAGAGGAAGG | 1789 |
| hs132691167 | AATGGAAGAATTTATCTGGTAGG | 1790 |
| hs132685095 | TTACTTCGTAGAATGGTGGTTGG | 1791 |
| hs132685727 | TACTTCATTTTTCTCCCGAGAGG | 1792 |
| hs132690613 | CATCGTTATGTGAATGCCATGGG | 1793 |
| hs132693623 | TATTACAATGTAATTAGCCATGG | 1794 |
| hs132694129 | TTTCTTTTTCCTGATTCCAAGGG | 1795 |
| hs132693966 | TCTCTTTTTAATTTCCTAGGAGG | 1796 |
| hs132692042 | CTATAATTTAATAAATCCAAGGG | 1797 |
| hs132690238 | AGGGAGCTTGAAATTTTGCAAGG | 1798 |
| hs132694029 | TGAATGGGTCAGCAGCCAAAGGG | 1799 |
| hs132684259 | AGATTTAGATTAACTGGGGTAGG | 1800 |
| hs132686112 | TGAATACCAAGAGGATGGAAAGG | 1801 |
| hs132684258 | ATCTAAATCTGCAAAACGAAAGG | 1802 |
| hs132693238 | GAAAACACTCAATTGGGGAGAGG | 1803 |
| hs132694371 | AAGCAAATGGAGCATGAGCATGG | 1804 |
| hs132685002 | AATTTGCCCTTATGAAAGGAAGG | 1805 |
| hs132684586 | GATTTATAAAAGGCAAACATGGG | 1806 |
| hs132693544 | ATTAAGCACTATGTCTGCATAGG | 1807 |
| hs132691182 | TTAGTTTAAAACAATACTGAAGG | 1808 |
| hs132686749 | ATTAAAAAGAACTTTCCCACAGG | 1809 |
| hs132686817 | TAGTTTCAGTTTTCAAACTGTGG | 1810 |
| hs132692431 | CTCTCTCATGGACAGTCAGAGGG | 1811 |
| hs132688678 | AGAGCTTCTTATTGAGAAAGGGG | 1812 |
| hs132693248 | TATGCTCACCCTTTACAGAAAGG | 1813 |
| hs132683352 | AGTATTTCCTTTGTTGACAAGGG | 1814 |
| hs132692968 | CTCCGTGCAGATTCTAAGGAAGG | 1815 |
| hs132686306 | GAAACCAGCAGGGACCTGAATGG | 1816 |
| hs132688491 | GCTTTCTGAACTGATTGGAAAGG | 1817 |
| hs132691348 | AGTATCCCTTGATACCTGAATGG | 1818 |
| hs132684271 | GGATGGGAAAACAATCAGAATGG | 1819 |
| hs132688461 | ATGAAATGTTTCTCAGCTAAGGG | 1820 |
| hs132693648 | GATGTTGGAGCAATAGCCACAGG | 1821 |
| hs132689987 | GGGATAATCACTTTCACTAACGG | 1822 |
| hs132689461 | ACAGACTCTTAAGCAGCAGTGGG | 1823 |
| hs132688212 | ATATCTGAGCAACAGATGCTAGG | 1824 |
| hs132686494 | TATCTCAAGAGCAAACACTTAGG | 1825 |
| hs132689067 | TTGCATCAGTTTCTAAACGAGGG | 1826 |
| hs132692721 | TAGTTTATATTACTTGAGGGTGG | 1827 |
| hs132684513 | TATTCACTGCCAATAACTTGGGG | 1828 |
| hs132687996 | GATGAAAAACAACTGCAGAAAGG | 1829 |
| hs132686542 | CAAAAGTTCATAGAAAAAAGAGG | 1830 |
| hs132693431 | CAACCCACTTGCATAGTGTAGGG | 1831 |
| hs132691500 | TCTAAGTGACAAAATTCTGATGG | 1832 |
| hs132683944 | TTGTCTTCTATGGCAAACCATGG | 1833 |
| hs132689175 | GATAGATTTACAGAAAGAGAAGG | 1834 |
| hs132691481 | AAGTATAGTTTCTCAATAGGAGG | 1835 |
| hs132686500 | CATATTCATTATGAATGCTGAGG | 1836 |
| hs132688784 | ATATTGAGATACTTGCCATAAGG | 1837 |
| hs132688137 | TGACAGCAGTCAGTTCATTGAGG | 1838 |
| hs132686755 | TTGAAGAGATAAAAACAAGCGGG | 1839 |
| hs132694067 | TGCTGTCAATGTACACCTGAAGG | 1840 |
| hs132686867 | GAGAGAGAAGACTTGCAAAAGGG | 1841 |
| hs132693542 | TTAACTAACAGACTAATGGAAGG | 1842 |
| hs132686849 | AGCATAATTTAATAAATAGACGG | 1843 |
| hs132693109 | TGGGTAATAGGAATATGGGATGG | 1844 |
| hs132689415 | AGTGGGGCAAAAAATGAGGTAGG | 1845 |
| hs132688584 | GTATGGTACTGGGATTGTAGTGG | 1846 |
| hs132692148 | TTTATAACCCTGATATTCCAAGG | 1847 |
| hs132693077 | ACAGTTCCTAAGGCCTTACCTGG | 1848 |
| hs132690279 | TTTTGATTGGATTCAGAGAGAGG | 1849 |
| hs132694220 | CTACTCCACTCGCATCATCCAGG | 1850 |
| hs132683941 | TTCATATTTCAATATCCCCATGG | 1851 |
| hs132687312 | GGAAGAACTTGAGCCAACTTGGG | 1852 |
| hs132684323 | TTGATATGCTAAATAAAAGGGGG | 1853 |
| hs132684400 | ACATGTGTCGGTGCTTGAGAAGG | 1854 |
| hs132684102 | CAGAGATCCTACAAGAATCCCGG | 1855 |
| hs132689837 | CTAGAAGTTATGCTGGTCCACGG | 1856 |
| hs132684200 | CATTCGTGTGTGCTGTGTTGTGG | 1857 |
| hs132690643 | AGTTAGTGCACAAGAGGCGTTGG | 1858 |
| hs132686831 | TCGCAGAGAATAAGAATCAAAGG | 1859 |
| hs132691347 | ATGTTCCATTCAGGTATCAAGGG | 1860 |
| hs132688670 | TGGGGAAAAAACAGACCAGATGG | 1861 |
| hs132689205 | TTAGTTGACAACACTGCTGAAGG | 1862 |
| hs132686016 | GCTTAGCATAACCATAACCTAGG | 1863 |
| hs132693033 | AGATAGGAAAAGGTTAGTTGAGG | 1864 |
| hs132683968 | GTGAGATGTCTACCAATGCCGGG | 1865 |
| hs132693392 | GGCCACCTGCTCTTATGCGTAGG | 1866 |
| hs132692792 | AGAAAGAAAATATACAAAGGAGG | 1867 |
| hs132691756 | CAGATGATCCTACAGTTATGAGG | 1868 |
| hs132683804 | ATATTACTCTTCAGCCACCTAGG | 1869 |
| hs132685699 | ATATCTAAATGTGAAGTTGGCGG | 1870 |
| hs132691464 | GAGAGGATCCAATGCCACATTGG | 1871 |
| hs132691081 | AAGCACTATGGTGTGCCACTTGG | 1872 |
| hs132691848 | GAATCTAGGCAGCTATTCCAGGG | 1873 |
| hs132693483 | AGGAAAGGGTAGTTTTCAAGAGG | 1874 |
| hs132686377 | TGACATCAAGGAATATTAAGTGG | 1875 |
| hs132684429 | CTTGACCTAGAATCAGAAGTTGG | 1876 |
| hs132689063 | GTTATCTAAAATAATCAGCATGG | 1877 |
| hs132693797 | GCCAGCACACAGGTGCCTTGAGG | 1878 |
| hs132694326 | TCATAATTCATATATACAGCAGG | 1879 |
| hs132688378 | GCTCCCCCCACCCTACTGCATGG | 1880 |
| hs132687314 | TCTGTTTGATGAAGGAGGCTGGG | 1881 |
| hs132683940 | TGCATCTAACATAATAAAGAGGG | 1882 |
| hs132693305 | CCAATGAGTGACCCACCTACTGG | 1883 |
| hs132691670 | ATGATGCTAAAAAAAATTGGAGG | 1884 |
| hs132687976 | AAAAACTGAGCATTATGCAAGGG | 1885 |
| hs132689595 | TTCTAAAAGCAGGTGTAAGAGGG | 1886 |
| hs132689592 | TATCCCAGATAAGAGCCTTAGGG | 1887 |
| hs132694192 | TGATCAAATATGTTCTAGAAGGG | 1888 |
| hs132690972 | ATTCCTACAGAACTCTCTGATGG | 1889 |
| hs132685750 | TATATATACGTGGCTTATGAGGG | 1890 |
| hs132687173 | ACATTTTCGTTGGCAGTGAAGGG | 1891 |
| hs132690300 | TCGTTCTGTGTTGTCAGACAGGG | 1892 |
| hs132693889 | TCTGGATTTAAATTTCTAAGTGG | 1893 |
| hs132685264 | ATTTTCTTAGAATATGGCTAAGG | 1894 |
| hs132688326 | AGTGCTATCATCCTAGTGTAGGG | 1895 |
| hs132687120 | GAATGGTAAGTTTGTCTGCAGGG | 1896 |
| hs132692226 | CTCAGGGTAATGCTTAGAGGTGG | 1897 |
| hs132688691 | TCTTTTTTTCACCTACTCGTAGG | 1898 |
| hs132690087 | AAAATAACTAGGAAGCAAAAGGG | 1899 |
| hs132684797 | TAATGCCCATGTGAGAAAAGAGG | 1900 |
| hs132688025 | AATTGATAGCAAGATTTCAAGGG | 1901 |
| hs132691480 | TATAGTTTCTCAATAGGAGGTGG | 1902 |
| hs132686379 | ATATTAAGTGGCACATTGAAGGG | 1903 |
| hs132690573 | TATATTACTTTGGAAGTGCAGGG | 1904 |
| hs132690096 | GAAAAATCACAAAATCAGAATGG | 1905 |
| hs132688501 | TGGCAGGATACAGGAATACCAGG | 1906 |
| hs132684250 | ATTAGGCTCAACTTTTCAGTCGG | 1907 |
| hs132692130 | CTAGTTGAGGACGTGTGCAACGG | 1908 |
| hs132685543 | TATTGTAGCTCAAATGTTGGAGG | 1909 |
| hs132690526 | ATAAACCCTTGTTTAGGCCAAGG | 1910 |
| hs132690715 | ATAAATACACATTTATTCCACGG | 1911 |
| hs132690177 | CTACGCAAAGTCACCTTCAGAGG | 1912 |
| hs132685780 | GCATATGAGTTTGTGAGCGAAGG | 1913 |
| hs132685926 | TGATATCCAAAAATGAAGACAGG | 1914 |
| hs132686091 | CTCTTCCAGCAGCTTCCTAGTGG | 1915 |
| hs132686188 | ATTTAGCTCTGATAATTACAAGG | 1916 |
| hs132690224 | ATGTGCCTTCTTAAACCAGATGG | 1917 |
| hs132693838 | CTATTTCACACCGTAAAAGTCGG | 1918 |
| hs132691038 | AGTGTAGTCATCTTTGTGGTAGG | 1919 |
| hs132683761 | TAATAGATGTGAGTGTAGGTTGG | 1920 |
| hs132684800 | TGAGTTAGAAGGTAGAGGAGTGG | 1921 |
| hs132693640 | GAATTAAGCGTTAACAAAGAAGG | 1922 |
| hs132690246 | AGTTAAAATGGCAACACCATGGG | 1923 |
| hs132694108 | ATACTTTGAATCTAAGGGAAAGG | 1924 |
| hs132685060 | ATATGTTCTGTACATCAGCCGGG | 1925 |
| hs132684207 | CACTGTACATTGACTTCCCAGGG | 1926 |
| hs132688385 | TGGAGAACCATGCAGTAGGGTGG | 1927 |
| hs132689769 | CTAAGTCCAGTGGGTGTCTGAGG | 1928 |
| hs132688481 | TTAAAACAAGAAAGCTCTAGTGG | 1929 |
| hs132688766 | ATAAGTATGTTTGGCAGTGGTGG | 1930 |
| hs132691662 | TTTATGTTTAGAATATAGAAGGG | 1931 |
| hs132687456 | AGTGCTTTAGGCTATTTCCCAGG | 1932 |
| hs132687161 | AATCCTCAACTCCTCTTCAAGGG | 1933 |
| hs132683324 | ACGTGCATGCTTTAAGGAAGGGG | 1934 |
| hs132684894 | AAAGGGAAAATAATAAGCTAGGG | 1935 |
| hs132694089 | TTACTAATATCTATATAGAGTGG | 1936 |
| hs132691140 | GCCATACTTCTGTCAACCACTGG | 1937 |
| hs132690614 | ACATCGTTATGTGAATGCCATGG | 1938 |
| hs132683760 | CATTTAATAGATGTGAGTGTAGG | 1939 |
| hs132683482 | CACGTAGTGAAGAAATGCAATGG | 1940 |
| hs132688949 | GGCCTTGTAGTTATCCCACATGG | 1941 |
| hs132690278 | TTGGATTCAGAGAGAGGCAATGG | 1942 |
| hs132684918 | GAGTTGTGACTCGCTAAAGAAGG | 1943 |
| hs132687061 | AAGCTTCTATCTGATTGAAAGGG | 1944 |
| hs132691588 | TCATCCGTATTTTATAGGAAAGG | 1945 |
| hs132685958 | TATCACCTCAGAGATATGCTAGG | 1946 |
| hs132689740 | AATTTGGGCATACTTGTATGGGG | 1947 |
| hs132688252 | AACGCGTTTAGGAAAAATAGAGG | 1948 |
| hs132693806 | ATTTTCTGATGAAAATTCAGTGG | 1949 |
| hs132684875 | ATAATCTTTTGCTAGGGCTGAGG | 1950 |
| hs132685462 | TTTCAGTGAGGTAACCAGCCAGG | 1951 |
| hs132691917 | CATGTACCTTTCAAGGGAGTAGG | 1952 |
| hs132684667 | AGATTTCTAAATGGCTACACAGG | 1953 |
| hs132688735 | TTAAAGCCTAGAGCATAGACAGG | 1954 |
| hs132692612 | ACCCAGGTAGTATCGCTGACAGG | 1955 |
| hs132693989 | AATCCTCCTGAAAGTTTGCATGG | 1956 |
| hs132688976 | TCCTCAGATGTCTATGCGAAAGG | 1957 |
| hs132689337 | CAGTAGCTCAGAATGAGATAGGG | 1958 |
| hs132690115 | CCAAAAGCAGAGTGGAAGAAGGG | 1959 |
| hs132683312 | ATCATTTCTCCATGGTTGGGTGG | 1960 |
| hs132692486 | TTTAACATAAAAAGTAGAAGAGG | 1961 |
| hs132692730 | CTTTTTTAAGGATGAAGGAGGGG | 1962 |
| hs132690318 | CTTTTATTAAACTACACAAGTGG | 1963 |
| hs132687299 | CAAACTTGCTGTAACCCTATGGG | 1964 |
| hs132688348 | AAAATTCTCTAATAAACTGGAGG | 1965 |
| hs132690820 | ATTTCCCCGTTTTCATACTGAGG | 1966 |
| hs132689735 | TATTGCATGACTCAAATACATGG | 1967 |
| hs132685261 | TCCAATTACAATAATCAAAGAGG | 1968 |
| hs132684087 | TCGAGCCCCGCGAGAAGGAGGGG | 1969 |
| hs132683606 | GTATATGAAAAGGTGTTAAGTGG | 1970 |
| hs132690632 | CATATGCCTCACTAAGGTCCTGG | 1971 |
| hs132693879 | GAGAACTGTTTGTATGGCTAGGG | 1972 |
| hs132685605 | TCAGACAGACTATCATTCAAAGG | 1973 |
| hs132689572 | ACTCTCCTGAAGCATAAACTTGG | 1974 |
| hs132688047 | ATAATCTTACATTCTCCCCATGG | 1975 |
| hs132685527 | ATATTATAAATTAGGCCATAGGG | 1976 |
| hs132690803 | ATGTACCTCATTTGCTAACGTGG | 1977 |
| hs132683538 | TAGTGAGTGTCCTCATTCTAGGG | 1978 |
| hs132692929 | TCTGTGTTTCTGGATGAAATGGG | 1979 |
| hs132693984 | AGACGTACATAAACTACCAATGG | 1980 |
| hs132690822 | ACAATTGGCTCCTAGAAGGTTGG | 1981 |
| hs132684076 | TTCCGCCCCTCCTTCTCGCGGGG | 1982 |
| hs132691489 | TATGGACCAAGAATAATGAATGG | 1983 |
| hs132693792 | GCTATGCATTAGAAGGAAGTAGG | 1984 |
| hs132686375 | ATTTCAGCTGCTCAAATGGAAGG | 1985 |
| hs132685411 | TCTTATGTAAAGAACACAAAAGG | 1986 |
| hs132693052 | GGCTTCATGCAAAATACTGAAGG | 1987 |
| hs132685356 | CTCATAGGCAATGTATTCCAAGG | 1988 |
| hs132694170 | GAAATTCCTGTAAAACCCATAGG | 1989 |
| hs132693899 | AGTTGTTTCTCAGGCATCTGTGG | 1990 |
| hs132691102 | CCATCAACCCAGTATTATGTAGG | 1991 |
| hs132692776 | ATTTGTAATACAAATTACGATGG | 1992 |
| hs132689609 | CTCTGAGCAACATATTACAATGG | 1993 |
| hs132684949 | CAACACCCAGATTAAGGCATCGG | 1994 |
| hs132692759 | CAAAACCCCAAAGATTGTTACGG | 1995 |
| hs132692396 | ACATGTCATATGCTTTCCCATGG | 1996 |
| hs132689919 | ATACTAAACAATTGATACCATGG | 1997 |
| hs132689238 | TGTGGTCACCAAGTCACCTGTGG | 1998 |
| hs132683885 | TGAGTATTAATTAGGACACTTGG | 1999 |
| hs132685899 | CAAATCAAGCAACACTCACACGG | 2000 |
| hs132692472 | ACTCATCTGTAATTTCAAGTTGG | 2001 |
| hs132686505 | AACTCTATAGTGATAACAGCTGG | 2002 |
| hs132685864 | GTAACATGTTTTGATTGAAACGG | 2003 |
| hs132692735 | AAGTCATGTTTTTCAAACAACGG | 2004 |
| hs132688778 | CCTGCATTTAACGCATTAGGAGG | 2005 |
| hs132689199 | ATATGTATGTATATATTCATGGG | 2006 |
| hs132684069 | AGGCGGTAGCTATTTAGGCTTGG | 2007 |
| hs132692270 | CAGCATATGCTAATTGCGTATGG | 2008 |
| hs132689706 | TATATTATATAAGGCCTGGATGG | 2009 |
| hs132688964 | AGAAAATTAGTTCTTGCCTAGGG | 2010 |
| hs132691365 | TCTGGCTGACTAATTAGCAATGG | 2011 |
| hs132693653 | ACAGAAGTAAGCGGGTTAGAGGG | 2012 |
| hs132684331 | GGAAAGTCCTTTTTTTACAAGGG | 2013 |
| hs132691920 | GCTAGAATGACTCTCAGCCTAGG | 2014 |
| hs132686973 | AAGAAACCATTGCTGTGAGAGGG | 2015 |
| hs132685181 | GGAAGGGTGGAATAATGTCTAGG | 2016 |
| hs132684964 | CTAACCATTATAGAATTCCTGGG | 2017 |
| hs132693793 | CTACGCTCTTTGCAGCCTCAAGG | 2018 |
| hs132693442 | TCTGAGCAGAGATCAACTGCTGG | 2019 |
| hs132685167 | GCAATGCTATATAGATGAGCAGG | 2020 |
| hs132686564 | AGTCAATCAGCTGAAAGCCTTGG | 2021 |
| hs132689644 | ACCTGTATATGTAATTTCCAAGG | 2022 |
| hs132684686 | TACCTGTGGTCTAAAAAAGTCGG | 2023 |
| hs132687126 | TGCATATCCTCAGGGTTCATCGG | 2024 |
| hs132683740 | TCCTGGGAGCTAATCAAAAGAGG | 2025 |
| hs132692247 | GTAAATCCTCTCATTAAGATGGG | 2026 |
| hs132683998 | AGAAGTCAGTTCGAACTCCCTGG | 2027 |
| hs132688033 | GAAAGGATAATATAATGAGTTGG | 2028 |
| hs132689298 | AATATGGCAGATAAATTGCAAGG | 2029 |
| hs132686742 | ACTCTTTAACCAAAAGGCTGTGG | 2030 |
| hs132690235 | ATTCTGATAACCCCTTCGAATGG | 2031 |
| hs132684357 | GTGCCTACCAAGAGAAGAAGAGG | 2032 |
| hs132688499 | TGTGGGAAATCGGAGATGGCAGG | 2033 |
| hs132691122 | TGCTATCTAGGTTTAAGTGAGGG | 2034 |
| hs132692208 | ATTTTGATGTCATTACCATAGGG | 2035 |
| hs132693988 | TGAAAACAGTTACCTCCCATTGG | 2036 |
| hs132690075 | CTGATTTAGTAGACGCTGAAGGG | 2037 |
| hs132688823 | ACTTGGCAATCCAAGCAAGATGG | 2038 |
| hs132685997 | AAAGATTCATCCCAGTTTAGCGG | 2039 |
| hs132694348 | TATATGATAGTCTATTAACTTGG | 2040 |
| hs132688179 | TCCAGCTAGGACAGGCCTGAGGG | 2041 |
| hs132688585 | TATGGTACTGGGATTGTAGTGGG | 2042 |
| hs132691249 | ATTAGAAACACAACACAGCCAGG | 2043 |
| hs132691568 | ATAATGCACAAATATAAAGAAGG | 2044 |
| hs132687491 | GGTAAACGTGGCAGAAAGCAGGG | 2045 |
| hs132685835 | TATGCCTTAATTTCAGCCTGTGG | 2046 |
| hs132691853 | GCTATTCCAGGGGCCAGATGGGG | 2047 |
| hs132691260 | AACAGAATTCACTATCTCTAGGG | 2048 |
| hs132687383 | ATATTTACTGAACATTACATTGG | 2049 |
| hs132693696 | CTTTCTAGCTGAGGATGAGTAGG | 2050 |
| hs132694133 | AACAAGAACTAAATTTGCCAGGG | 2051 |
| hs132687517 | GGTTCTGTTTGACTTTTGAAAGG | 2052 |
| hs132693918 | ATGTATGGCAGAAGAACTAAAGG | 2053 |
| hs132687316 | TGAGCTCTGTTTGATGAAGGAGG | 2054 |
| hs132692288 | AATACAAAACAAACACAAGTAGG | 2055 |
| hs132687432 | GCTTCTAGTTTCACTAGGAACGG | 2056 |
| hs132685218 | CATAACTCTGACATAATCGTTGG | 2057 |
| hs132685990 | ACTTACCTAGTTATTTACTCTGG | 2058 |
| hs132684559 | AGTCCTTTCTACAGTTCCCAAGG | 2059 |
| hs132691031 | CCCAGGAAACAACTTGAAAGAGG | 2060 |
| hs132688626 | CTATCTTCTAGAGAGTTGACAGG | 2061 |
| hs132693149 | TCTCAATTAGTACAAAGCCATGG | 2062 |
| hs132685010 | ACATATTCAAAAATAGAGGTTGG | 2063 |
| hs132688965 | AATTAGTTCTTGCCTAGGGAAGG | 2064 |
| hs132684952 | CAGTGGTTAGGAGGAAGGAGAGG | 2065 |
| hs132685071 | TTTTCTAAGTGGACTTAGGAAGG | 2066 |
| hs132692188 | TGTGACTGATATGAATTCAAGGG | 2067 |
| hs132692622 | GCTTGATAGTATTTCACCACAGG | 2068 |
| hs132686570 | TTCAGGTTCTCGATGATGCAAGG | 2069 |
| hs132690939 | TCGCTAAGCTTGTCACCACATGG | 2070 |
| hs132691328 | GGAAAATTGCAGAATGCAGAGGG | 2071 |
| hs132683393 | TCATCCAGCACCATTAAAGAAGG | 2072 |
| hs132684347 | CTAACTTACCTTACTTGCAAAGG | 2073 |
| hs132686623 | ATAAATGGAGTAAAAGTTGAGGG | 2074 |
| hs132692501 | AACGTTATAGGCCCATAAAAGGG | 2075 |
| hs132691356 | TATCAAATTTGTTAAACAGGTGG | 2076 |
| hs132690831 | AAGATTGCGAACATAGCAAAAGG | 2077 |
| hs132689646 | GTTTTCAAATTTAAGCCAGAGGG | 2078 |
| hs132685202 | AGTGTGCTTCTTATGTCCTGAGG | 2079 |
| hs132693276 | AATCCAAACAGTGTTCATATGGG | 2080 |
| hs132686024 | GTGCCGTGCTACTTAAGAGAAGG | 2081 |
| hs132690720 | GTATAATCTATTTGAGGGCAGGG | 2082 |
| hs132691916 | AAACTTCATGTACCTTTCAAGGG | 2083 |
| hs132686802 | TTATTGCTGAAGCATGTGATAGG | 2084 |
| hs132688588 | CTACAATCCCAGTACCATACAGG | 2085 |
| hs132693975 | ACCTCAGAGGTTACAAAGGAGGG | 2086 |
| hs132687014 | ATATAAACTAAATTTTTCCAAGG | 2087 |
| hs132689086 | GAATCATTATTATCAACAGAAGG | 2088 |
| hs132688713 | GATCACAAAATATCTCTCAAAGG | 2089 |
| hs132684754 | TTCATGGTCCTCGATGCTGAGGG | 2090 |
| hs132689459 | TTTTTTCCCCTGAGTTACTGAGG | 2091 |
| hs132689411 | TGCAATGTGTGGTATATGAGTGG | 2092 |
| hs132689239 | CAGAAATGAGAACACAGGGTTGG | 2093 |
| hs132687881 | TTCTAATATCCCTCTCCCAAAGG | 2094 |
| hs132692393 | TGGCATAATCATTTGCCCATGGG | 2095 |
| hs132688943 | CCCCATGTGGGATAACTACAAGG | 2096 |
| hs132691754 | GTAGGATCATCTGCCGCTGATGG | 2097 |
| hs132689162 | AGTGGCTTAGCTGTAAATAGAGG | 2098 |
| hs132688286 | GTAGACATAGAGCTCAGAATAGG | 2099 |
| hs132693904 | CTTTTTAGCAACCTATTCCAAGG | 2100 |
| hs132684664 | AGACACAGCTATAAGGAAAGAGG | 2101 |
| hs132688331 | TTAATGGGAATTGACAAAAAGGG | 2102 |
| hs132684785 | TTCTATTTTCAGGAACCTAAGGG | 2103 |
| hs132687277 | TTACTCTTATTGAGAAAGCTCGG | 2104 |
| hs132688951 | ATTTGTTACAAAAATCAAGATGG | 2105 |
| hs132692152 | AAATACACCTTGGAATATCAGGG | 2106 |
| hs132689050 | GTCACATGATGCAGGCAGCTGGG | 2107 |
| hs132689545 | GATGAGGAGAAGGGTAGGAGAGG | 2108 |
| hs132688058 | CATTTTTCAGAGAAGAAGAGAGG | 2109 |
| hs132687397 | TTATTGGAATTTGTTATGGAGGG | 2110 |
| hs132692166 | CATTTGCTTTGCCACTCACATGG | 2111 |
| hs132694172 | CTTTCCCTAGAAAAAAAATGTGG | 2112 |
| hs132686382 | GAAAACAATTTCTCAATCCACGG | 2113 |
| hs132689224 | GCTATTTTTAGGTTTGGGGTAGG | 2114 |
| hs132689065 | CATCTGATTTCAAATCTGCATGG | 2115 |
| hs132693409 | ATAAGGAGATACAAAACAGATGG | 2116 |
| hs132683612 | GTGTTAGATACAATGCAGGCCGG | 2117 |
| hs132692604 | CCTCTTATAAAGACGAGAGCAGG | 2118 |
| hs132685490 | GCCAAATAGGGATACCTCAAAGG | 2119 |
| hs132689108 | TTATAGTTTTATCTGGCCTGGGG | 2120 |
| hs132691252 | GGGAGCAGAAGAATTAGAAATGG | 2121 |
| hs132691945 | AGGGACAAAATAAAGTCAGTTGG | 2122 |
| hs132687630 | TGTGAAACATACCAAAGGAAAGG | 2123 |
| hs132687863 | ATAATTATGCCATATTCAGATGG | 2124 |
| hs132693255 | TGAACCTTCCCTCAATACTAAGG | 2125 |
| hs132694387 | CAGCTGGGTCGACATCAACTTGG | 2126 |
| hs132688354 | GTATTAAGCGAAGCCATGGCAGG | 2127 |
| hs132683483 | ACGTAGTGAAGAAATGCAATGGG | 2128 |
| hs132687373 | GATGAAGTTTGGACAATGGATGG | 2129 |
| hs132689255 | AGCAGCTGCAGAGTGTTCTGAGG | 2130 |
| hs132694048 | ATGCTAACCTGAAATTGTATGGG | 2131 |
| hs132685871 | TTAAGGTGCGTATAAACTCATGG | 2132 |
| hs132688144 | AGCTAAAGAGTAAATCAGGCAGG | 2133 |
| hs132690679 | GGTGTTTCTTACCTGATGGAAGG | 2134 |
| hs132692992 | CATCAAGGTGAATGGGAAAGTGG | 2135 |
| hs132692871 | GTAATGCTTTCTCTTGTGAAAGG | 2136 |
| hs132684100 | GAAAAAATGAGAGCTGAAGATGG | 2137 |
| hs132687125 | TGTTTTCATGCATATCCTCAGGG | 2138 |
| hs132691574 | AAATCTAAGTGGAAGTCCAAGGG | 2139 |
| hs132684870 | CCAGGAAAAGGGGTTCAAGAAGG | 2140 |
| hs132688525 | CTACTTTTTCAGGTATTGTGGGG | 2141 |
| hs132685698 | TATGTGTCTACGTTGCTGGATGG | 2142 |
| hs132687431 | TTTCAGCTTCTAGTTTCACTAGG | 2143 |
| hs132688321 | GCAGTATAGGCTTTAAAGTAGGG | 2144 |
| hs132683590 | GTTGGACTCAGAAACCAGATTGG | 2145 |
| hs132684788 | TGGTCCTCATCAAAGTCCGCTGG | 2146 |
| hs132688522 | AAGTCACTGATATTTAATAGAGG | 2147 |
| hs132693860 | GTACATCACAGCAAAATAAGTGG | 2148 |
| hs132692413 | CATTTTGCTGAATTTAATTGGGG | 2149 |
| hs132691384 | AATACCAGATAAATGTAGCTCGG | 2150 |
| hs132693393 | GCCACCTGCTCTTATGCGTAGGG | 2151 |
| hs132683833 | TAACCAGTAACCGCTAAAAGAGG | 2152 |
| hs132686940 | TCAGAAGCAGGCTTCCCTAAAGG | 2153 |
| hs132683993 | TATCTCCAACAACGGAAAAGAGG | 2154 |
| hs132683864 | ATATAAATATAAGGGAATGTTGG | 2155 |
| hs132684088 | CTCGAGCCCCGCGAGAAGGAGGG | 2156 |
| hs132689015 | TCTTAAAGACAGTATACAAACGG | 2157 |
| hs132692658 | ATTTGAGGGGATGTCACAATGGG | 2158 |
| hs132687952 | GTTACTTAGTAATTCTCTGTAGG | 2159 |
| hs132693744 | TATCAGCAGATCCATCTGCTTGG | 2160 |
| hs132684493 | TTTATAGTCCATCATTTGCAGGG | 2161 |
| hs132685888 | TTTCATGTAGTTGGGATCAAGGG | 2162 |
| hs132691502 | GAATTTTGTCACTTAGAGAAGGG | 2163 |
| hs132688155 | ATTATTTGCTAGCCTCATGTAGG | 2164 |
| hs132693269 | CATTCATTTGGCCTTTGGAGAGG | 2165 |
| hs132690641 | CCTAAAAGTTAGTGCACAAGAGG | 2166 |
| hs132694284 | TTGCCTGCTCTTCAGGTGCGTGG | 2167 |
| hs132685285 | GAGAAAGAACACCTGTGCATTGG | 2168 |
| hs132684017 | TTATCTGTGAATCACCCAATGGG | 2169 |
| hs132685976 | CCTCCCTAATACCAGTGAAAGGG | 2170 |
| hs132692731 | TCTTTTTTAAGGATGAAGGAGGG | 2171 |
| hs132687790 | GAGTTATTTTAAATGTATAGGGG | 2172 |
| hs132693607 | GAGACAGAAATGAAAAATCAGGG | 2173 |
| hs132694139 | ATCTTTTCTTGAGTAGCGAAAGG | 2174 |
| hs132684607 | ACTTTGGTACTATTCCATAGTGG | 2175 |
| hs132690417 | AAGTTTGAAGAACTTTTACCAGG | 2176 |
| hs132688662 | AGTGTAAATAAACCAACTGATGG | 2177 |
| hs132689388 | AAACATTTCTTGCCATTCAAGGG | 2178 |
| hs132687980 | TATTTCAGAGAAAAAATATGTGG | 2179 |
| hs132690364 | AAGGCAGAAGTTTTGCCACTGGG | 2180 |
| hs132685207 | AGTTCTGCCAGGTTTATGTACGG | 2181 |
| hs132691660 | TTAATTAAAAGGAACGAAAGTGG | 2182 |
| hs132685788 | AGGGATACTTAACCAAAAGCTGG | 2183 |
| hs132687358 | ATATAGGAGACGTAATATATGGG | 2184 |
| hs132694353 | CTCAGGCTATGGAGGAGACTGGG | 2185 |
| hs132690712 | AAAACAATGGAACTGGGCCGTGG | 2186 |
| hs132683801 | CTAGGCCAGATAAGGAGCCCTGG | 2187 |
| hs132692283 | TCAATCTTAGCACCAGTGCCAGG | 2188 |
| hs132687750 | TATAGAATAGCTATATATTGAGG | 2189 |
| hs132684404 | GGAAGTTAGGAGGAGCAAGCTGG | 2190 |
| hs132692948 | CATCCCCTGCTTATTAGGATAGG | 2191 |
| hs132689955 | CCCATTCTCTAGACTTGCATAGG | 2192 |
| hs132693599 | ACACTCATCATGGGGGAGGAGGG | 2193 |
| hs132685208 | GTTCTGCCAGGTTTATGTACGGG | 2194 |
| hs132689659 | TATTACAATAATAAATTCAAGGG | 2195 |
| hs132687516 | CACTGTCCCTTAAAGCTGATCGG | 2196 |
| hs132689223 | CGAGCCTCATTCTTTTGTAGTGG | 2197 |
| hs132692753 | AACTTCCGTAACAATCTTTGGGG | 2198 |
| hs132684943 | TCTCCCCGATGCCTTAATCTGGG | 2199 |
| hs132690748 | TTAAAGAAAGAAATTAGGAAAGG | 2200 |
| hs132683564 | GGAAATGAATTGGTGACAGAAGG | 2201 |
| hs132687033 | ATTATAAGCATGGACCGTGCTGG | 2202 |
| hs132688297 | AACAACTTCAGATTAGTGTAGGG | 2203 |
| hs132684614 | TCTACTTAAAAAGGTTAAGGAGG | 2204 |
| hs132693177 | GCTTTCTACCCTAACAATAGAGG | 2205 |
| hs132691423 | TCTCCTTTTGTCTTTTAGTGGGG | 2206 |
| hs132685680 | GATTCTGGCTACTGTTTGAGAGG | 2207 |
| hs132689456 | ACAGCAGTCCTCAGTAACTCAGG | 2208 |
| hs132685042 | CTTAAAATGTTAAGTACTGAGGG | 2209 |
| hs132683345 | TATGTTTTTAAGAGAAGCAACGG | 2210 |
| hs132683574 | GTAGCAATATTTCAGTTCCAAGG | 2211 |
| hs132684477 | GTTTGTGCCACTTTAAACACTGG | 2212 |
| hs132693252 | AGGAACAACAGAGCATTCAATGG | 2213 |
| hs132690659 | CCTACCATTTCAGTCTTGGATGG | 2214 |
| hs132687221 | TATTACACTTTGTTGTCCGCAGG | 2215 |
| hs132692285 | TGAGATTCATCTCCTGGCACTGG | 2216 |
| hs132684805 | CGTTACAGGATACTGTAAAAGGG | 2217 |
| hs132686930 | GAGTCATCCAAATATATCCCAGG | 2218 |
| hs132686975 | CAGGTAGATTGAGCCGGTGAGGG | 2219 |
| hs132685284 | TCCCAGTGAGTCTAACAGCCAGG | 2220 |
| hs132691129 | ACCAATCTAAACATTTCCTAAGG | 2221 |
| hs132686227 | ACTTGAGGCCATGAAATTGAGGG | 2222 |
| hs132689606 | TCACTGTCTAAGCTAGTACTAGG | 2223 |
| hs132684457 | ATTTATTTAGTGCCCGGAAGGGG | 2224 |
| hs132685137 | CTTGGAATTCCTATGCCAGCAGG | 2225 |
| hs132686880 | CAGCTAGTTTTTTTTTCAGGGGG | 2226 |
| hs132691416 | AGCGTTTTCTCGTGTTCAAGAGG | 2227 |
| hs132686586 | CATTAGTCATGGAGTCCTAAGGG | 2228 |
| hs132691678 | CAGAAACGCTCTTTCAATGGTGG | 2229 |
| hs132683616 | AAATATATTACAACTTCCCGTGG | 2230 |
| hs132685796 | TGATGTTATCTATTTAGTACGGG | 2231 |
| hs132683664 | ATTGCTAAGCATGCCCTGTAGGG | 2232 |
| hs132692543 | GGGTGATAGTCGCCAGAGAAGGG | 2233 |
| hs132684142 | TCCAAATGATCAATTTTCCATGG | 2234 |
| hs132692107 | GGGTAGATACATTTTATGAGTGG | 2235 |
| hs132691083 | TATGGTGTGCCACTTGGAAAGGG | 2236 |
| hs132691691 | CATTTTATAGAAGTTGAACATGG | 2237 |
| hs132686125 | TTATCTCAAGGAATAAATAGAGG | 2238 |
| hs132694249 | AGAATGGGAGGATAATAGGATGG | 2239 |
| hs132688767 | TGTATAAGTATGTTTGGCAGTGG | 2240 |
| hs132684283 | GATGCACATTGATTTAACTTCGG | 2241 |
| hs132686309 | GATTTCAAACAGAAACCAGCAGG | 2242 |
| hs132686569 | GCAAGGAAATTACAGACGTTAGG | 2243 |
| hs132684981 | ATTTCGTTGACCCTTAACTAGGG | 2244 |
| hs132685474 | CAGCTGTGTAACATAAAAGCTGG | 2245 |
| hs132692108 | CTCATTTGCATGGCTCTACGTGG | 2246 |
| hs132683508 | ACATTGACTGTAAAGCGAATGGG | 2247 |
| hs132687959 | CCTTGTCTGTGTTACAGCAATGG | 2248 |
| hs132689858 | ATAAGCTCTTGGTTTTCTGAAGG | 2249 |
| hs132691494 | AAGCTGTATAGAATTTAAAGTGG | 2250 |
| hs132690360 | TTTTAATGTGACTCAATACATGG | 2251 |
| hs132690694 | TTTAGCTCTCAAAAGCACATTGG | 2252 |
| hs132692368 | ATATAAGAATGACATTTACTAGG | 2253 |
| hs132684035 | AATCTTACGCCTTTTAGAAGAGG | 2254 |
| hs132690391 | GAGTTGGGACGGATAATTGAAGG | 2255 |
| hs132683863 | TCTCGCAGTTGAAGGATTCAGGG | 2256 |
| hs132687764 | GCTCACAGTCGCCCCTATGAGGG | 2257 |
| hs132692350 | CTATAGCCTTGACTCACCACAGG | 2258 |
| hs132688472 | ATGCACAGAAAATAAAATGAAGG | 2259 |
| hs132691629 | TTATTCTGTTCTAGGATGAGAGG | 2260 |
| hs132692817 | GATCCTTCCTCTCATAAATGAGG | 2261 |
| hs132687223 | TGTTTGGGATTTCAGTTGGAAGG | 2262 |
| hs132691075 | CCCATGACAAAACTTTCAGCCGG | 2263 |
| hs132687700 | CATTCGGTTAATTTTCAAAGAGG | 2264 |
| hs132692848 | ATTTCTATAATCTATTGCCAAGG | 2265 |
| hs132687261 | GGTAGCTTACTGCTATTTGGAGG | 2266 |
| hs132687070 | GCCGCCCTCGAGCTAGGACATGG | 2267 |
| hs132690475 | AACTTTTGATTGAATCCCAAGGG | 2268 |
| hs132687275 | AGCTTTCTCAATAAGAGTAAAGG | 2269 |
| hs132692615 | TCAGCGATACTACCTGGGTATGG | 2270 |
| hs132692914 | TTTCATCTCTGTAGATGAGGTGG | 2271 |
| hs132689779 | CCTATAGTGCATGCATGCCAGGG | 2272 |
| hs132694100 | TATAAGTCAGAGGGAGGAGATGG | 2273 |
| hs132686693 | ATACTGCATGGAACTCGGGTGGG | 2274 |
| hs132686592 | TTACATCCTATACTTGGCTGAGG | 2275 |
| hs132688066 | AATAGTGTGGGTCAACTGAAGGG | 2276 |
| hs132690110 | ATGGAATCAGGACTATAAAAGGG | 2277 |
| hs132684189 | TCTGAAACACACAACTTGGATGG | 2278 |
| hs132693342 | TCAGATTATCTGCAACCCACTGG | 2279 |
| hs132691080 | TGCAAATGATAGACTCAAGAAGG | 2280 |
| hs132693455 | TGTCTTCTTGTTAAGCGAAGTGG | 2281 |
| hs132687192 | GTGCAATGCCCAGAGCCATAAGG | 2282 |
| hs132693345 | ATGTTCTGAAAGAACACAAAAGG | 2283 |
| hs132689938 | ATACTATTCTGAATAGTACTTGG | 2284 |
| hs132692777 | TTTGTAATACAAATTACGATGGG | 2285 |
| hs132694204 | ATTTCAGTAGACTTACAGAAAGG | 2286 |
| hs132683638 | ATATTGAGTAGGCAGCTGTATGG | 2287 |
| hs132691706 | AAATGCAGCTGGAGTGAGTAGGG | 2288 |
| hs132685432 | GAGCAATGAGTATGTAGGAAGGG | 2289 |
| hs132693439 | CCATAACCAAATGGGATGAAAGG | 2290 |
| hs132688846 | TGCAGGGTCTGGGGATTCTGGGG | 2291 |
| hs132692497 | CCTGTAACTGGAGACAAGAAGGG | 2292 |
| hs132688611 | AGTCTACCTGGATTATTGATGGG | 2293 |
| hs132690262 | CGTTTTTATTAAATGCAACCAGG | 2294 |
| hs132684566 | AGTTTGGAGCTCCATTTTCAGGG | 2295 |
| hs132689810 | TATATAAAGTTTCTTGGTGAGGG | 2296 |
| hs132693891 | ATCTACTCTGCATGAAGCTAGGG | 2297 |
| hs132693287 | GACTGGGGAATATAAAGAAAGGG | 2298 |
| hs132689397 | GATCCTTAAAGAGAAAACTTAGG | 2299 |
| hs132688237 | CAGACCTTTGACACTTACTTCGG | 2300 |
| hs132685234 | CAGGCCATCAAACACCCATAAGG | 2301 |
| hs132690189 | GAAGATGTGAGCTATAAAAGAGG | 2302 |
| hs132688639 | CAAATGATCTTTATGCCCTAGGG | 2303 |
| hs132684131 | TATAAACCACACATCACGTATGG | 2304 |
| hs132694305 | GGAAGCTCACATTTTTTCGAAGG | 2305 |
| hs132693857 | ATAGAGAATTCATGGCCCTCAGG | 2306 |
| hs132691224 | ATATTCCACCTTGAAAAAGCAGG | 2307 |
| hs132691043 | TGGAGGCCTTATCAAACACCAGG | 2308 |
| hs132694171 | TTTCTGCTCACTGGTAGCGCTGG | 2309 |
| hs132688042 | ACTTTCTTTTGCTAAGTAGGAGG | 2310 |
| hs132685873 | GATTCTACTTGTATCATGATGGG | 2311 |
| hs132687031 | ATATTTGGCAATTATAAGCATGG | 2312 |
| hs132691868 | TTAGAGACCGATGAGTGAAAGGG | 2313 |
| hs132684827 | GTTCTATCTGAATAAAGCCATGG | 2314 |
| hs132692510 | GCTTTTTCCTTTGAGAACTGTGG | 2315 |
| hs132686212 | GATGTGTTCAAAACATTATGAGG | 2316 |
| hs132687419 | TCATGCCAAGTTAAAGTGGTTGG | 2317 |
| hs132687035 | CTACTCTCAATTTTCAGATGCGG | 2318 |
| hs132684021 | ATTGTTTCCATCTAAAGTAAGGG | 2319 |
| hs132693051 | ACTGAAGGACAGCGAGTGCATGG | 2320 |
| hs132689263 | GAATGCTTATAAAGAGTGGCAGG | 2321 |
| hs132685975 | TCCTCCCTAATACCAGTGAAAGG | 2322 |
| hs132685346 | TGTTTTGCTTGAAGGAACTCAGG | 2323 |
| hs132686099 | CATTCCTAAGCATATTAAAGAGG | 2324 |
| hs132692026 | CCAAGACTGAATCATAGAATGGG | 2325 |
| hs132686302 | TTTAACATAAGGCTTTAGACTGG | 2326 |
| hs132692866 | CATGGATGTCTCTTGTCATACGG | 2327 |
| hs132683636 | ATTTCACCTCTAAATTACACTGG | 2328 |
| hs132688434 | GGAAGGAGCAGCAGTTCTGTGGG | 2329 |
| hs132685824 | ATATAAAAGGATTCAGTATGAGG | 2330 |
| hs132684673 | TTTGAAAATGGGTCTGAGAACGG | 2331 |
| hs132687215 | TCAAAGAGTACCATATAAGCGGG | 2332 |
| hs132683650 | ATGCTTTAGAAACAGACAAATGG | 2333 |
| hs132687055 | TGCTTAGAAAGATTAGTTGAGGG | 2334 |
| hs132686761 | GAGAGGGAGAGAAAGAGAAGTGG | 2335 |
| hs132687029 | TATTAAAGAAAACAAGGTGTGGG | 2336 |
| hs132692809 | ATATTAAGTATGTGTCCAAAAGG | 2337 |
| hs132691033 | GGAACAGAGGCGTAAATAGCAGG | 2338 |
| hs132684737 | ACAATGTCGTTCTTGAGGGATGG | 2339 |
| hs132687202 | TGCTTTATTGGAGGATCACAGGG | 2340 |
| hs132688897 | TCCTTGTCCATCCCAGTACAAGG | 2341 |
| hs132689766 | TTACTGAGAAAGTGAATGGTTGG | 2342 |
| hs132690934 | TCTCAGTGATTCTTTCGCCCAGG | 2343 |
| hs132692546 | CTTATGGATTGTTTGACTGGAGG | 2344 |
| hs132690063 | TCTGACAGCCCATTAGAGACGGG | 2345 |
| hs132688982 | GTTGAAGTGGGCATGTGGAAGGG | 2346 |
| hs132687129 | CCTCCAAGCTAAAAATTCATGGG | 2347 |
| hs132684713 | GGCATCAATAGCTAATTCTAGGG | 2348 |
| hs132685381 | TCTTTTTTCAAAATTATGCCGGG | 2349 |
| hs132686315 | AAGAAGCAGAAGAAACAAACCGG | 2350 |
| hs132692157 | TTATATGTTAACATGATCAAAGG | 2351 |
| hs132683523 | ATATTATCGATTAGGCCTGTTGG | 2352 |
| hs132692788 | GACAGTGGACCACATTGTATAGG | 2353 |
| hs132684165 | AATTTGCAGCCTTTTGTAGAGGG | 2354 |
| hs132686903 | AACTCATTAGAAAACTAATGAGG | 2355 |
| hs132685935 | TGGCTCTGGAGATTTTATAGAGG | 2356 |
| hs132693811 | CCATGCTGCACAGTACAATTGGG | 2357 |
| hs132688685 | TTAGAGTTCTCAGTAAATGTAGG | 2358 |
| hs132690330 | GCATAATTACATTATTTAAGGGG | 2359 |
| hs132692662 | GAGGCCATTGAACAATTTGAGGG | 2360 |
| hs132685009 | GATTCAAATGGCACAACAGAAGG | 2361 |
| hs132684904 | TTTCACATAGTGGTTGGTGATGG | 2362 |
| hs132685035 | ACATGCATATTTTACTGCCATGG | 2363 |
| hs132689027 | TTCTGATTCCCATTCTCTGAGGG | 2364 |
| hs132686380 | ATTCTACTATTAAGTAATGAAGG | 2365 |
| hs132689586 | TTAGTAAAACTTATTTGCGCGGG | 2366 |
| hs132684584 | ATTTCTGCCATTAATACTGTAGG | 2367 |
| hs132693985 | GACGTACATAAACTACCAATGGG | 2368 |
| hs132689428 | GGTATTACAGAAGCATTGTAAGG | 2369 |
| hs132688412 | CTGCTTTTAGAAAGTAAGCCCGG | 2370 |
| hs132692626 | TCTTCTTAAGCAGCTAGTATGGG | 2371 |
| hs132693770 | TAAAACGGCATGAAAGGAAAGGG | 2372 |
| hs132692648 | GTTTTATGTTGGGTACAGGTTGG | 2373 |
| hs132685204 | ATTCTGCCTAAAGTTCTGCCAGG | 2374 |
| hs132685291 | ATTGGCAGTGACAGCGGAGGAGG | 2375 |
| hs132689856 | TCTTGGTTTTCTGAAGGCTAGGG | 2376 |
| hs132690312 | GAAAATATTACAATAGAAGGTGG | 2377 |
| hs132688969 | TATTGTGAAGGAGCAAATACCGG | 2378 |
| hs132692432 | CCTCTCTCATGGACAGTCAGAGG | 2379 |
| hs132691760 | GAGCAGGACTGTCTAGACTTTGG | 2380 |
| hs132689442 | GTCCGAAAAGAGCAAAGGGCTGG | 2381 |
| hs132683598 | GCATAAATTCTGTGATTAAGTGG | 2382 |
| hs132693723 | AGACTGAGACTGTATCTACTTGG | 2383 |
| hs132684416 | TATTCTGCCTCCAGGATTTGGGG | 2384 |
| hs132686922 | GGGGCTTTTGTTGTGAGGAAGGG | 2385 |
| hs132687245 | GTTAGGCTCCTGCTGAGAGTTGG | 2386 |
| hs132683992 | ATCTCCAACAACGGAAAAGAGGG | 2387 |
| hs132688229 | GATTGATAAATGAGAGTCCTGGG | 2388 |
| hs132690734 | AACTACATTGTGAAGCCTGATGG | 2389 |
| hs132685569 | CACATAACCTCCCATTTCTAGGG | 2390 |
| hs132683692 | TTAGAACTTCTTGAACAAGTTGG | 2391 |
| hs132690183 | AAATACTTGGGAATTTCAGTAGG | 2392 |
| hs132683387 | AAGATAATCAGAGTCACAAAAGG | 2393 |
| hs132685507 | TTAATATGTAACTCATGGCTTGG | 2394 |
| hs132686134 | TAACACCTGAGTTTTTAAAGTGG | 2395 |
| hs132691600 | TGAGCTGTTACAAAAGTGGTTGG | 2396 |
| hs132686133 | GTATTCCACTTTAAAAACTCAGG | 2397 |
| hs132689627 | GTTCATCAAAATACTCGTGTTGG | 2398 |
| hs132690141 | TAATGAAATGAGAATGTAGATGG | 2399 |
| hs132684922 | TCTAGAACAGCATTTCCAAATGG | 2400 |
| hs132688270 | GCAAGACCAAGATTATCATCTGG | 2401 |
| hs132693926 | GCAGGTACAGAAGTAGATCATGG | 2402 |
| hs132692122 | GACAGTGGTGAGTTTTAGTAGGG | 2403 |
| hs132684715 | CTCATATAGTTTAAAACACACGG | 2404 |
| hs132685494 | TTTTATTCAGTAGATATCACTGG | 2405 |
| hs132693175 | AAGCAGCGCCTCTATTGTTAGGG | 2406 |
| hs132693713 | ATTACAGTATATTCTACAGTTGG | 2407 |
| hs132694225 | CTTTTCCATTGCTACCAAAGAGG | 2408 |
| hs132694207 | GCTGAATTTACCTATTTGGTAGG | 2409 |
| hs132692488 | ATATTGCAGCAACATTATGAAGG | 2410 |
| hs132687401 | CTATAAACTTTAAGGGAGCAGGG | 2411 |
| hs132690421 | ACCTTCGGAGAAAAACGAATAGG | 2412 |
| hs132688267 | ACATTTCCTCTTGATAAATGAGG | 2413 |
| hs132683681 | AAGATTTCCAGTCTGAAAAGAGG | 2414 |
| hs132686066 | GAGAAAGGATGTTTTAGCTGTGG | 2415 |
| hs132693113 | ATCCCATATTCCTATTACCCAGG | 2416 |
| hs132688269 | ATAATCTTGGTCTTGCCTGCCGG | 2417 |
| hs132689151 | GGAAAAATACTTGGCCAGATGGG | 2418 |
| hs132690134 | ATAAATATGAAAACCATACATGG | 2419 |
| hs132694343 | GTCTGGTTAAGGAACACTATTGG | 2420 |
| hs132687849 | AATATCAACCGTCTTCTCACTGG | 2421 |
| hs132692302 | TGCTAGAAATTTGTGAGCAAAGG | 2422 |
| hs132688195 | ATTCTGAGCATGCCCAGTGGTGG | 2423 |
| hs132689768 | CAGATTACTGAGAAAGTGAATGG | 2424 |
| hs132687151 | TTTAATTATACAGCTACCCTGGG | 2425 |
| hs132687050 | CTAATTATACTCATGCTACAAGG | 2426 |
| hs132690737 | GATGCCACCTAATCTCCATCAGG | 2427 |
| hs132690062 | CTCTGACAGCCCATTAGAGACGG | 2428 |
| hs132686263 | TATGAAAAAAAAATAGGATAGGG | 2429 |
| hs132689867 | CAGTATGGGAAATCAAAAAAGGG | 2430 |
| hs132688428 | TCAGTGAGTTTATTAGGCTGAGG | 2431 |
| hs132685180 | TAGCTAAGTATTAGGAAGGGTGG | 2432 |
| hs132687058 | TGTTTCACATTTAAGAGGGAAGG | 2433 |
| hs132685141 | TGCTGTATGCCTGCTGGCATAGG | 2434 |
| hs132684440 | ATAATTTAGTGCAAAGGTGTAGG | 2435 |
| hs132684571 | AATTGAGTGGTGCACGTCGAGGG | 2436 |
| hs132693012 | ACTTTAAAGTCGTTGTGAAGTGG | 2437 |
| hs132690697 | AGGAGTTTAGTGATATCAGTTGG | 2438 |
| hs132692565 | CCATCATTCCCATGGCCTGTAGG | 2439 |
| hs132694051 | TCGGTCCAGCAACAATAAGCTGG | 2440 |
| hs132691722 | GCTCATTACATTCTATATTGTGG | 2441 |
| hs132691011 | GCTAATTAATGGGGACCCATGGG | 2442 |
| hs132693719 | TATTTGATGCCGTATGTGCTCGG | 2443 |
| hs132685427 | GGTCTATTCATTCAGGCTAAGGG | 2444 |
| hs132692801 | TATATGTTTAGCCTAGAGGCAGG | 2445 |
| hs132685998 | GTTTTCTCTTCCGCTAAACTGGG | 2446 |
| hs132690917 | AGTATGAGCATGCAACGGTTAGG | 2447 |
| hs132687515 | CCCTTAAAGCTGATCGGCAAAGG | 2448 |
| hs132692127 | CGTTGCACACGTCCTCAACTAGG | 2449 |
| hs132689751 | CCAGGGTGGAAAATAAGCTTAGG | 2450 |
| hs132694149 | TCAGTTTTATAGTCTTCAGTGGG | 2451 |
| hs132688557 | TTGAGAGTAAAATTTGAGCATGG | 2452 |
| hs132693398 | GCCATTTGCCAAGTGCCAAATGG | 2453 |
| hs132690286 | ATACAGGGTATATAATTTGAAGG | 2454 |
| hs132692203 | CATTGTGGGATTCCTCCCTATGG | 2455 |
| hs132693459 | TAAAAAGTGGAGCTTGCAAAGGG | 2456 |
| hs132687579 | TTTCTTGTTCATCTATTGTGAGG | 2457 |
| hs132690116 | GCTTTTGGCTAAGACTGTCATGG | 2458 |
| hs132689553 | TTGTAGCCATGATAAACAAATGG | 2459 |
| hs132685221 | TTTACATTTCATTCTTTAGGGGG | 2460 |
| hs132693171 | GAACCATTAGTACTTACAATGGG | 2461 |
| hs132687207 | TTTCAAAATTGGCTATTCTGTGG | 2462 |
| hs132689019 | AGATGTATTGATTTCTCCAAGGG | 2463 |
| hs132689400 | GTTTTCTCTTTAAGGATCTGTGG | 2464 |
| hs132692458 | CCTCTGAGCCCTCAAGGTGGAGG | 2465 |
| hs132685852 | TTATGCAAAGCTCCTATTGTGGG | 2466 |
| hs132689952 | CCTATGCAAGTCTAGAGAATGGG | 2467 |
| hs132685115 | CATTTTATACTAACTATGGGTGG | 2468 |
| hs132693028 | GCACCCATGTCAATATGATCAGG | 2469 |
| hs132690252 | ACTAATAGATGTTTTACGTAGGG | 2470 |
| hs132685214 | TGAAAACCTGGAAAAACTAAAGG | 2471 |
| hs132687779 | GGAAATAACAGACAAAAGAAAGG | 2472 |
| hs132685893 | AGACAGATTTTAGGTTAAAGGGG | 2473 |
| hs132694286 | TTTCATTAATAATCAACAGCTGG | 2474 |
| hs132692430 | GAGGCCAGACTTGCAGGGCAGGG | 2475 |
| hs132686694 | TACTGCATGGAACTCGGGTGGGG | 2476 |
| hs132691764 | AATTCAGCCTGGTATTACTCTGG | 2477 |
| hs132684234 | CTTTCACTGTGGTAACTGGAAGG | 2478 |
| hs132685786 | TATCAAGATACTTGAAAGCAGGG | 2479 |
| hs132692462 | TTGTGAACTCCTCCACCTTGAGG | 2480 |
| hs132688314 | ATAATTAGCTTATGATCAGATGG | 2481 |
| hs132685193 | CCACATTGCTGGTACCGTTGGGG | 2482 |
| hs132684454 | ACATGTATTTATTTAGTGCCCGG | 2483 |
| hs132686770 | CTTGGAATTGAAATGGAAGCTGG | 2484 |
| hs132687675 | ACATAATACAAACTTCACTTTGG | 2485 |
| hs132685350 | AAGGTCCTCTTCATAGCAGCAGG | 2486 |
| hs132683673 | TTATTGTCTGCTCTCTGTAGTGG | 2487 |
| hs132683410 | CTTTCTGCTACCAGTAGAAGTGG | 2488 |
| hs132686894 | TTTCAGATAATTAGGCAGCCTGG | 2489 |
| hs132689648 | AGAGGGGAAATATACCCTAATGG | 2490 |
| hs132685729 | GATTTCACAAATTAAGGAGAAGG | 2491 |
| hs132690403 | TGCATATTCTATTACTGCAGTGG | 2492 |
| hs132686514 | GTAGAAAACTGTGTCATTCGTGG | 2493 |
| hs132684679 | TTATGGGTGTAAAGTGTAAGTGG | 2494 |
| hs132691339 | CTACGTTGTTAAAAATGGGCAGG | 2495 |
| hs132693847 | TAGAGGGAAGAAGGATGCAATGG | 2496 |
| hs132691682 | ATTATCATAATTGAATAAGAAGG | 2497 |
| hs132693116 | TATTTTAGATTTGCTTGTAACGG | 2498 |
| hs132688752 | TTCCAACTCTACACCTCCATTGG | 2499 |
| hs132692266 | TTTGACTTTTTATATTTGAAGGG | 2500 |
| hs132694014 | CCAGACAGTAAAGCTGACTTAGG | 2501 |
| hs132692101 | AGCCCTGGTGATTTTTAGGGTGG | 2502 |
| hs132693853 | CTTTGCTTAGCTCTTCTGGAGGG | 2503 |
| hs132691214 | TTTAATTTCAGGGTTCATGAAGG | 2504 |
| hs132693298 | TTTTAGAATAGGTTACAAGTAGG | 2505 |
| hs132692252 | CAGTAGATCATGTTATGTAAAGG | 2506 |
| hs132686131 | GAGATATTACCCCAGAAGGCTGG | 2507 |
| hs132688583 | GGTCAAAATCAAGATTTGGCAGG | 2508 |
| hs132693196 | ATAGAGACTTCCAAAAAGAATGG | 2509 |
| hs132689508 | CCGCCAATGGAGGTTAGGTATGG | 2510 |
| hs132690113 | GCCAAAAGCAGAGTGGAAGAAGG | 2511 |
| hs132684739 | TGTCGTTCTTGAGGGATGGGTGG | 2512 |
| hs132684061 | AGTGTCATACCTTCCATCAAAGG | 2513 |
| hs132683674 | GACAATAACGATGCTCCTATGGG | 2514 |
| hs132685463 | TGAGGTAACCAGCCAGGCTACGG | 2515 |
| hs132689279 | TGATTTCCATGAGGAAAGCTGGG | 2516 |
| hs132687793 | TCAAAATTAGTTCCAGAAGAAGG | 2517 |
| hs132687171 | ATCTTCTTAAACATTTTCGTTGG | 2518 |
| hs132684592 | GTAAAAAATGAGAGATAGGTGGG | 2519 |
| hs132692720 | TTTATATTACTTGAGGGTGGTGG | 2520 |
| hs132693662 | GTATTATAACTCTTTAGCATAGG | 2521 |
| hs132691049 | TCCTAGCAAAAACTCCCAAATGG | 2522 |
| hs132688392 | TTATGGGCATGAACCAGCCTTGG | 2523 |
| hs132685636 | ATAGAGGGAGATAAAGGAAGGGG | 2524 |
| hs132685307 | GAAGCTTTTTCCCTTAAGGATGG | 2525 |
| hs132685085 | GTTAATAAATGAAGAACTAAGGG | 2526 |
| hs132683701 | CTCTTCATTTAAAAAAGAGAGGG | 2527 |
| hs132693408 | TGTTTTTATTATGCTAGCCATGG | 2528 |
| hs132684204 | TTTGCTATGCACCGGACCCTGGG | 2529 |
| hs132684814 | AATAATACCCACATCAGTAGAGG | 2530 |
| hs132688416 | AGAACACATCAGAAAATAAGTGG | 2531 |
| hs132687668 | CTATTGTTAAACATCAATAGAGG | 2532 |
| hs132692063 | ATTTCTGTAATAAAAAGTATGGG | 2533 |
| hs132692027 | GCCAAGACTGAATCATAGAATGG | 2534 |
| hs132686765 | CACAGAGGCTGAGTTTTGACTGG | 2535 |
| hs132690204 | TTTATATGCCCTTAAAACGCTGG | 2536 |
| hs132689472 | TGTGACCCGACTGGTTCCCTGGG | 2537 |
| hs132686636 | AGTGTCAGATATGGAGGTTGTGG | 2538 |
| hs132694058 | TTATCAGCATCATTCAGCTCTGG | 2539 |
| hs132686479 | ACTGAGGCTATACTTCTGTATGG | 2540 |
| hs132690835 | AGATTATAATTGTTTATAGAGGG | 2541 |
| hs132688303 | TGGCACAGTAAGCCTTTGGATGG | 2542 |
| hs132685237 | AGGATGACAAAGGTCCTTATGGG | 2543 |
| hs132691444 | CTAGTCCTCCCTGAGAATGTAGG | 2544 |
| hs132692641 | AAGAGCCTCCTCGAGGTGAATGG | 2545 |
| hs132688395 | GAGTATTACACACAAAATAGTGG | 2546 |
| hs132690622 | ATTTACCTCATAAAACAGTTGGG | 2547 |
| hs132693691 | TTGTTACATCTAATACTGGTTGG | 2548 |
| hs132686795 | CTTTAATCATGAAAACAAAAGGG | 2549 |
| hs132686101 | GTTAATGTCCTACTAAAGCTAGG | 2550 |
| hs132687553 | ATACCACCACTGTACTGTACTGG | 2551 |
| hs132687026 | ACGTAAGCCACAATTTTACAAGG | 2552 |
| hs132688756 | TTCACCTCTCTCAAGAGGCTTGG | 2553 |
| hs132687296 | TGATTGCATATCTTTCCCATAGG | 2554 |
| hs132685107 | GCTCGATTAGGTTTGGTGGTTGG | 2555 |
| hs132686025 | ATAACTTGAGTGCTTTTCAAAGG | 2556 |
| hs132683745 | CTTGGATAATCTATTAGCATTGG | 2557 |
| hs132694427 | TTTGCAGAGTTTGAAGAGCTCGG | 2558 |
| hs132692325 | TCTGTATATCTGCCTCCTCCAGG | 2559 |
| hs132686987 | TGAATACCAGACAAAAATACAGG | 2560 |
| hs132692855 | ATTGCATAACCAGTTGTCACTGG | 2561 |
| hs132687156 | GCAGCACAATGTATCACCTTAGG | 2562 |
| hs132691036 | GTAGTCATCTTTGTGGTAGGTGG | 2563 |
| hs132688652 | GGATTGTCTAAGTCATTGGCTGG | 2564 |
| hs132688313 | CAGTGAGAGTTGGATAGAGAGGG | 2565 |
| hs132692560 | TTCTTAGTAGCATACCACTATGG | 2566 |
| hs132685118 | ATTACAGCCAATCACAATAGTGG | 2567 |
| hs132685434 | ATAGAGAGCAATGAGTATGTAGG | 2568 |
| hs132690678 | TTAAGGTGTTTCTTACCTGATGG | 2569 |
| hs132691170 | TGCATGACTTGAAGACACTAGGG | 2570 |
| hs132685983 | GTGATCAGTGAAATTTACATTGG | 2571 |
| hs132691420 | AATCTGTCAGTATCTCTCTCTGG | 2572 |
| hs132692410 | GATTCGGTAAATGCCATTTGAGG | 2573 |
| hs132683700 | CCTCTTCATTTAAAAAAGAGAGG | 2574 |
| hs132686936 | TTGGTCAATTTGCAACCCCTGGG | 2575 |
| hs132691427 | GGGAAGGCAACTTAAGCTAAAGG | 2576 |
| hs132686830 | ATAGACTAAAACTTTACATAGGG | 2577 |
| hs132689281 | CTAAAACCCAGCTTTCCTCATGG | 2578 |
| hs132687011 | CCCAGAGCATAAGATTGAAGTGG | 2579 |
| hs132692088 | TTGTAGCTGTGAGTAAAGTAAGG | 2580 |
| hs132684388 | TAGTGCCCAACCAGAGCAAAGGG | 2581 |
| hs132691250 | AGAAATGGTGGCAAAGAGCTAGG | 2582 |
| hs132693230 | ATTGTTGTAAATTTTCCTGAAGG | 2583 |
| hs132687411 | CTTGGGAGAGCCCCGAAAGATGG | 2584 |
| hs132690221 | TAATCTCTAGAGGAGCCATCTGG | 2585 |
| hs132689153 | TATAAAGGTGGAAAAATACTTGG | 2586 |
| hs132687752 | TTATAGTTAGCAAGATAGCCTGG | 2587 |
| hs132685431 | TGCTCTCTATTATACAAAGAAGG | 2588 |
| hs132691963 | TTTTACATATATTGATTGGAGGG | 2589 |
| hs132685591 | ATTGGCATAGCATTACACTATGG | 2590 |
| hs132684475 | CCTTAGATAGTATTATTATGTGG | 2591 |
| hs132688202 | GTAGGCCTCAAGACCTTGAATGG | 2592 |
| hs132686242 | GTAGATGTCACAGCGCAAACAGG | 2593 |
| hs132688384 | GGAGAACCATGCAGTAGGGTGGG | 2594 |
| hs132683972 | CTCCCAGCTCAACTTTGGGATGG | 2595 |
| hs132685715 | AGGTTCTTTTACTTTTAGCAAGG | 2596 |
| hs132683985 | GTGTCAATCAAAATAGTCTTCGG | 2597 |
| hs132688755 | AGAGAGGTGAAGGATATCTCAGG | 2598 |
| hs132693159 | TCTCTGCTCCAATACATACTTGG | 2599 |
| hs132691116 | GTTAAAAATCTGCTAAGTAAAGG | 2600 |
| hs132690951 | CTTCAGCCCCACACCAAACATGG | 2601 |
| hs132692942 | ATCGTCAATGTTGAGCGTATCGG | 2602 |
| hs132690100 | TTTAAGTCAGCACTTAGCTCAGG | 2603 |
| hs132691833 | TCTTTTCAAGAATGATTGCTGGG | 2604 |
| hs132691424 | AGACCCCACTAAAAGACAAAAGG | 2605 |
| hs132686209 | AATGAGGAGGAAAAAATATGAGG | 2606 |
| hs132686585 | TCATTAGTCATGGAGTCCTAAGG | 2607 |
| hs132689025 | GATGTATGCCCTCAGAGAATGGG | 2608 |
| hs132687420 | GTCCTCATGCCAAGTTAAAGTGG | 2609 |
| hs132690023 | ATAGAGTGTGAAGAGGAGATCGG | 2610 |
| hs132686102 | TTATTCCCTTTTCTAAAATGAGG | 2611 |
| hs132683374 | TCATATTGAGCTTTTGGCAGAGG | 2612 |
| hs132689598 | AGAGCCACTGTTCTAAAAGCAGG | 2613 |
| hs132692555 | GATTGAGGCCTGATTCAACTTGG | 2614 |
| hs132683952 | ATCATTATAAGGAGATGAAAGGG | 2615 |
| hs132694421 | GCTGCGTTAGATTTTGGGGAGGG | 2616 |
| hs132693086 | TATTTCTGTCTGTTTGGAGTGGG | 2617 |
| hs132692234 | GCTCAACTGTGTGTTAGGCCTGG | 2618 |
| hs132691268 | GAGTCCAGTTAAAGGTAGCTTGG | 2619 |
| hs132685581 | GTAAGATAGTGTAAGTAAAGAGG | 2620 |
| hs132685416 | CTAAGCATCTTTTTTCAAGCGGG | 2621 |
| hs132691039 | GCAAAGTGTAGTCATCTTTGTGG | 2622 |
| hs132689887 | GAACAGATGTTACGTGGTAGAGG | 2623 |
| hs132686321 | AAGCTTTAGATGCTGTACTTAGG | 2624 |
| hs132685116 | TTACATTTTATACTAACTATGGG | 2625 |
| hs132686579 | TCCTTTGTCTCATATACTACGGG | 2626 |
| hs132690661 | CATCCAAGACTGAAATGGTAGGG | 2627 |
| hs132683943 | TGTCTTCTATGGCAAACCATGGG | 2628 |
| hs132688266 | AAATGTGAGTTTCTCTCAAAGGG | 2629 |
| hs132687561 | CAGGATAGCTTACTTATACAGGG | 2630 |
| hs132688650 | GTCTAAGTCATTGGCTGGAAGGG | 2631 |
| hs132688921 | TTTCTTTCTCAGCCTCCAAAAGG | 2632 |
| hs132694378 | TTTCTTTCCCCTACAATCAGTGG | 2633 |
| hs132694218 | CTACTTAAGTACTAGAGACTTGG | 2634 |
| hs132690339 | TTTGTAAGTTTATCAAACTACGG | 2635 |
| hs132693458 | CTAAAAAGTGGAGCTTGCAAAGG | 2636 |
| hs132684838 | ACCAGTCTTTTAAACAGTATCGG | 2637 |
| hs132687324 | ACTGAGTAATGGAATCTTGAGGG | 2638 |
| hs132693527 | TTTTAAGTCAACAACATACATGG | 2639 |
| hs132683840 | TTTAGTTTGACTCCTCAGCTAGG | 2640 |
| hs132688983 | GGTTGAAGTGGGCATGTGGAAGG | 2641 |
| hs132689133 | CCGCAGCTAATAATGACATATGG | 2642 |
| hs132688486 | TGATGTATAGGAAGCAAAGAAGG | 2643 |
| hs132685174 | CTCTGTAACTTGTTTTAAGGTGG | 2644 |
| hs132684546 | AAGTATTGCCAGAGCTTGAAGGG | 2645 |
| hs132692451 | TGAAAAGGAGTAGGAGGCTGAGG | 2646 |
| hs132692933 | GAGATATGTGCGGCTAACACAGG | 2647 |
| hs132689269 | GGAGCCAGAATAGGGAGCTAAGG | 2648 |
| hs132686100 | AGTGCCTCTTTAATATGCTTAGG | 2649 |
| hs132684438 | TCTAGCCTCCACTCTAGGATTGG | 2650 |
| hs132688302 | GCTGTGGCACAGTAAGCCTTTGG | 2651 |
| hs132690267 | ATTGGAATATTTTCTGGGGAAGG | 2652 |
| hs132685589 | AACTTAATATTTGCAAAACTGGG | 2653 |
| hs132693972 | CCTCACACCCAACTCCTCCTAGG | 2654 |
| hs132686576 | TTCCATAGTTGATTAGCGTATGG | 2655 |
| hs132689443 | AGGTGTCCGAAAAGAGCAAAGGG | 2656 |
| hs132693138 | TGTTTGTATTATAGTCCAAAAGG | 2657 |
| hs132691838 | AATCTGTTACACTAGAGATACGG | 2658 |
| hs132691770 | AGTTTTGTCCATATCATAGCAGG | 2659 |
| hs132683791 | GTGTATATCCATAAAAAGAATGG | 2660 |
| hs132685164 | TATCAAAACTAAGTGCAAATGGG | 2661 |
| hs132692563 | CTATGGCCCCATCATTCCCATGG | 2662 |
| hs132687514 | TGATCGGCAAAGGAAGAAGCTGG | 2663 |
| hs132691497 | TTAAATAGAGCAAGTATGCTTGG | 2664 |
| hs132683988 | TATGAAACCCCCATAGGCTACGG | 2665 |
| hs132684562 | TTGCAACCAAACAAATCCTTGGG | 2666 |
| hs132685863 | ATTCATGTATTATAAAAGGCTGG | 2667 |
| hs132693365 | AAGAGATTAATGGCAAGAAGAGG | 2668 |
| hs132686917 | GTTTGACACCAATAACCTATAGG | 2669 |
| hs132688382 | AGAACCATGCAGTAGGGTGGGGG | 2670 |
| hs132689608 | TCTGAGCAACATATTACAATGGG | 2671 |
| hs132689076 | TTTCAGAATAATAAATAGTAGGG | 2672 |
| hs132685450 | ATATATCTTTCAAAAATAGCTGG | 2673 |
| hs132683407 | GGTAGCAGAAAGAATGAGGTTGG | 2674 |
| hs132688975 | GACATCTGAGGAGGAACAAAGGG | 2675 |
| hs132692175 | ATATGCATATAAGATGTCATTGG | 2676 |
| hs132686777 | GAGGAATCAGAAAACTGAAAAGG | 2677 |
| hs132687639 | GATGATGTATCTTTGATTGAGGG | 2678 |
| hs132689566 | GTTATCATAAATCCTGTCCTAGG | 2679 |
| hs132691068 | TTAGTTTAAAAGAACTCTGTAGG | 2680 |
| hs132683729 | GCTTGATCTTTCATAAACACTGG | 2681 |
| hs132685286 | TCCTGGCTGTTAGACTCACTGGG | 2682 |
| hs132684653 | CTTCAAGGGCACAGATTACAGGG | 2683 |
| hs132683604 | ATTGAAGAAATGTATTAGAGTGG | 2684 |
| hs132694338 | TTACGTATTCCTCTTAGAAAGGG | 2685 |
| hs132684504 | GGAGGAAAGCAGTTTTGCATTGG | 2686 |
| hs132692163 | ATATCTAATGTTTCATCACATGG | 2687 |
| hs132686964 | TGCACCTGTTTCTTCCACTCCGG | 2688 |
| hs132691390 | GATATTTTTTATACTATCAAGGG | 2689 |
| hs132693828 | GAGCCTTTAAAATACCATGTAGG | 2690 |
| hs132684604 | GTTTCCTTTTGTTCTCTGGAGGG | 2691 |
| hs132691585 | TTAGCATTGTTATTCCGTCTGGG | 2692 |
| hs132685106 | ACTTGCTCGATTAGGTTTGGTGG | 2693 |
| hs132684169 | TATTGATGCCCCTCTACAAAAGG | 2694 |
| hs132693232 | CCCAATTGAGTGTTTTCCAAAGG | 2695 |
| hs132686824 | TTAGTTTTAATGGCCCAAAAGGG | 2696 |
| hs132683665 | AGGGCTCCTCAATTGTTGCATGG | 2697 |
| hs132687281 | TACTGCAGAACAATTATGGCCGG | 2698 |
| hs132683753 | ATTTATTTCTGTACTAAGATCGG | 2699 |
| hs132684067 | AGCTATTTAGGCTTGGTCGCCGG | 2700 |
| hs132689010 | TCAGGGATTCACAAGAGAGCAGG | 2701 |
| hs132691873 | ACAGACTAGTTCTTAAAGATAGG | 2702 |
| hs132690745 | TTTCTTGTGTAGTAATAACTTGG | 2703 |
| hs132686829 | AATAGACTAAAACTTTACATAGG | 2704 |
| hs132686578 | ATCCTTTGTCTCATATACTACGG | 2705 |
| hs132688970 | GCAGTTAACATTCATATGAAAGG | 2706 |
| hs132692570 | CTACAGGCCATGGGAATGATGGG | 2707 |
| hs132693366 | AGAGATTAATGGCAAGAAGAGGG | 2708 |
| hs132692965 | AGGAGCTGCAGCTTTTCAAAGGG | 2709 |
| hs132692657 | CATCCCCTCAAATTGTTCAATGG | 2710 |
| hs132688920 | GGAAGTCAACAAATTGTCAATGG | 2711 |
| hs132688506 | TATCAATCATCGCTGAGAAAAGG | 2712 |
| hs132686966 | GCAACCGGAGTGGAAGAAACAGG | 2713 |
| hs132686325 | AAAAAATTATTCCAGTTACATGG | 2714 |
| hs132689585 | ACTTATTTGCGCGGGTAATGAGG | 2715 |
| hs132693747 | AGAATCATTTTCCAAGCAGATGG | 2716 |
| hs132688558 | TTATACTTATATTCAAGCACAGG | 2717 |
| hs132690504 | TATCTCATACACCTTTTGCTGGG | 2718 |
| hs132686591 | TCTAATTTACATCCTATACTTGG | 2719 |
| hs132693674 | TCTGGGTTTTGCATGACAGCTGG | 2720 |
| hs132683412 | GCCGCAGGTATGTCATTCATAGG | 2721 |
| hs132689345 | GATCTGTGAGAGATGGGAATAGG | 2722 |
| hs132685723 | TTAAAAAAAAAGAAGCCTCTCGG | 2723 |
| hs132688034 | GCCTTTGACCATATTCTGAAAGG | 2724 |
| hs132687297 | GATTGCATATCTTTCCCATAGGG | 2725 |
| hs132685700 | TATCTAAATGTGAAGTTGGCGGG | 2726 |
| hs132693510 | CCTGGATTATTTCCATCTATGGG | 2727 |
| hs132685944 | TTCTGAGCTGCCTTAGCAAAGGG | 2728 |
| hs132683693 | AGTTTACATTATTTGCTCATCGG | 2729 |
| hs132688519 | ACAGCATAATTTTCTACATACGG | 2730 |
| hs132686771 | TGTGGCCCAAAAGAAAAGATAGG | 2731 |
| hs132690579 | GCTGCATTAATCATAATGCTTGG | 2732 |
| hs132684505 | TAATTCTGAGGGCGTTTTGGAGG | 2733 |
| hs132687753 | TTTTGTGTTTAGAAATGCTAGGG | 2734 |
| hs132683442 | TTATTTTTATTCAGTATATGTGG | 2735 |
| hs132692154 | ACACCTTTTTAAATACACCTTGG | 2736 |
| hs132687967 | TTTAAGTGACTGTCTATTGGAGG | 2737 |
| hs132690432 | GTGTTGACTCACTCAGTGTTGGG | 2738 |
| hs132684346 | CTTACCTTACTTGCAAAGGATGG | 2739 |
| hs132689185 | ACAAAAAGTTAGTTTTCTGTAGG | 2740 |
| hs132691745 | AAAGACATACTAGGATAAAGTGG | 2741 |
| hs132688578 | TTAACATCAGAAAGAACGTTGGG | 2742 |
| hs132683487 | TTAATGATAAACATTAGATAAGG | 2743 |
| hs132683953 | GATGCATATGAGATTATTGGAGG | 2744 |
| hs132685743 | CAATCTAGAGGAAATGGCTTCGG | 2745 |
| hs132690261 | GGAAATATTTTCATGAAACCTGG | 2746 |
| hs132690328 | ATTTAAGGGGAAAAAGGTGTTGG | 2747 |
| hs132690763 | GTGTCATCCTAAGAAACAATTGG | 2748 |
| hs132693173 | TGCTGCCTGCTGTATCTCACTGG | 2749 |
| hs132691781 | TCACTTGAAGATTTTTAGTAGGG | 2750 |
| hs132686690 | GCAAGATACTGCATGGAACTCGG | 2751 |
| hs132686371 | TTCTTCAAGGATGTGTTGTAGGG | 2752 |
| hs132688862 | TGACAAGTGATCCTCAAAACAGG | 2753 |
| hs132687084 | ATAACAAATTAAGATCTAAAGGG | 2754 |
| hs132683913 | GGAATTCACAAACACAGATAGGG | 2755 |
| hs132685061 | CATATGTTCTGTACATCAGCCGG | 2756 |
| hs132689120 | AAGCTGGTAAACCTCATTGTAGG | 2757 |
| hs132690842 | CATTGTGGATGTAGAGTCATTGG | 2758 |
| hs132690051 | GGGTGACCACAGTTTAAAGAAGG | 2759 |
| hs132692400 | ATATGCATACCTCTTAAAATGGG | 2760 |
| hs132688463 | CATAGGATCACAATTCATCTAGG | 2761 |
| hs132688161 | ATCCCTCACGTTCTTCAGGTTGG | 2762 |
| hs132692935 | ATTTAATTAATCTTCAGTGATGG | 2763 |
| hs132685333 | TTAAAAAAATACAATGGTAAGGG | 2764 |
| hs132694315 | CTACAGGGTTATTTTGTGGTTGG | 2765 |
| hs132683567 | TATGTCTAATGGGTGCTCAATGG | 2766 |
| hs132688138 | TGGATGTAGTAGTTGAGTAGTGG | 2767 |
| hs132689494 | TTATGCTCATCTCTAGGTATGGG | 2768 |
| hs132690126 | AATAATATGGGACACCGTAATGG | 2769 |
| hs132691750 | TGTAAAATGATGAAAGCAAAGGG | 2770 |
| hs132691651 | GCTCTTTTGGTGTGATCAAGGGG | 2771 |
| hs132683425 | GCTGCTTGAAATGACTAAACAGG | 2772 |
| hs132685897 | GCAAAGCTTGAAATAGCAAAAGG | 2773 |
| hs132686178 | GTAAAATATGACAAAACTCTAGG | 2774 |
| hs132692980 | GATACAGTCTAGGGGTGGACAGG | 2775 |
| hs132687687 | CAGCCCTCTACCCTAAATAAGGG | 2776 |
| hs132691410 | GTAAACTATTGTAGCTCTAAGGG | 2777 |
| hs132688923 | GAAACTTGATAGCCTTTTGGAGG | 2778 |
| hs132688405 | ATTAAGCTCTACATTGGCTAAGG | 2779 |
| hs132691694 | AATCTGAAGGACAAGAAGCTTGG | 2780 |
| hs132684523 | TCTGAAACACTGAAGATCAATGG | 2781 |
| hs132683490 | TTTTGGAGCATTATAAAGGAAGG | 2782 |
| hs132687597 | ATACATAGCAAGACATGTATTGG | 2783 |
| hs132687721 | GTGTATGCAACTAAGATGATTGG | 2784 |
| hs132687194 | GGGATGGCTGGGGGGAATGTGGG | 2785 |
| hs132693526 | GTAGTGTTTGCAGCATGAAAAGG | 2786 |
| hs132687392 | TAGAAAGGATATTTCTAGAGAGG | 2787 |
| hs132684879 | AATTTTTGAGAATGGAAGCTGGG | 2788 |
| hs132686422 | ATTACTTTCGATCTCAAGACTGG | 2789 |
| hs132692476 | TGGCTAAAACATCTATAGAAAGG | 2790 |
| hs132691768 | CATTCTGCATATATTTAACATGG | 2791 |
| hs132687844 | GCTCCATTTAAAACTATGGCAGG | 2792 |
| hs132693937 | TGATGCCGAAAAGAACATATAGG | 2793 |
| hs132692295 | GAGAATATTGAGAAATAAGGTGG | 2794 |
| hs132688962 | GTATTACCAGCCAAGTGCCTTGG | 2795 |
| hs132692176 | TTGTGTTCTAAATTCAAAGAAGG | 2796 |
| hs132688631 | GGAGGCCCCAATACTGTTGAAGG | 2797 |
| hs132694321 | GTATAGTGTGTTACAGAACTTGG | 2798 |
| hs132685965 | ATTGTGAAACAATCTCAAATAGG | 2799 |
| hs132689351 | ATAGCAGTCAATGCTTATATGGG | 2800 |
| hs132692348 | CTAATTTGTTGCCCATGTCAGGG | 2801 |
| hs132687596 | CTTGCTATGTATGGCCAAACGGG | 2802 |
| hs132690782 | ATTTGATTCGAATTTAAATGAGG | 2803 |
| hs132691327 | AGGAAAATTGCAGAATGCAGAGG | 2804 |
| hs132693333 | GCTCCATGCATTTTTAAGTACGG | 2805 |
| hs132692424 | GGCTTTAAAGATCTAAACTAAGG | 2806 |
| hs132690539 | GATTATCAACTAAGGCTGAATGG | 2807 |
| hs132694143 | GTAAAACTTTACTTGTATGTTGG | 2808 |
| hs132691479 | AAGAGAGTATCCATCTCCTAAGG | 2809 |
| hs132683524 | GGATATGGGTGACTGCCAACAGG | 2810 |
| hs132692726 | TTGTTTGCTTGATTTATACATGG | 2811 |
| hs132693226 | AAATAACTCTTTAAAGGAAAGGG | 2812 |
| hs132684801 | ATAATTGAGTTAGAAGGTAGAGG | 2813 |
| hs132687581 | TGCCAGCGTGATTTCTTCAAAGG | 2814 |
| hs132690821 | GAGTACAATTGGCTCCTAGAAGG | 2815 |
| hs132688009 | CTAGCTCCCTGCCACAAAGATGG | 2816 |
| hs132693922 | TTAGTTCTTCTGCCATACATAGG | 2817 |
| hs132683609 | GTTGGAAAAACAGTGCCATCTGG | 2818 |
| hs132689674 | TTCCAAATTTAAATTCCCATTGG | 2819 |
| hs132693943 | AACTCCTTGTCTCTTTTGGAAGG | 2820 |
| hs132685876 | ATCCTTCTATGAGCAAAAGTTGG | 2821 |
| hs132686836 | ATTTTACTGCCAGTTTCAGCAGG | 2822 |
| hs132691620 | TATTCAACAGTCACAGAAAGAGG | 2823 |
| hs132690599 | ATAGAATTCAAGCAATTTGGAGG | 2824 |
| hs132690596 | AAACTAGCATATTTTCCCATTGG | 2825 |
| hs132691432 | AGGTGGCTGTTAATGATAAGAGG | 2826 |
| hs132690628 | GTTGGAATAGCAATAGAAAAGGG | 2827 |
| hs132693688 | AATTTTATTTTCTAACCTGTTGG | 2828 |
| hs132688455 | TGTAATTTAGGTGAAATTGTTGG | 2829 |
| hs132692362 | CTGTTTGTTTTCTAAGCAAAGGG | 2830 |
| hs132687339 | GCCTTTGTTGTTGCCTTCAGGGG | 2831 |
| hs132693310 | ATATTTTTATTACAAGTATGTGG | 2832 |
| hs132691155 | GGAAAATCAAACCAAGCAAAAGG | 2833 |
| hs132686079 | AGCTGATGAGATTTTAGAAGAGG | 2834 |
| hs132689244 | GCACAGAAATGTAGATTTCGCGG | 2835 |
| hs132690234 | TTCTGATAACCCCTTCGAATGGG | 2836 |
| hs132688666 | CTTGATGAATTCAGAATCTAGGG | 2837 |
| hs132686421 | CCTTGAAATTGCTAATACAATGG | 2838 |
| hs132684137 | TCTTATCTATATGATGGGATGGG | 2839 |
| hs132692853 | AGAGACTAACCAGTGACAACTGG | 2840 |
| hs132687263 | TTCTTTTTGTAATAGGAGATGGG | 2841 |
| hs132687586 | GACATATTCCTGACTCCAGCAGG | 2842 |
| hs132691896 | ATATAATTCTTATTATTTCAGGG | 2843 |
| hs132684232 | CCACAGTGAAAGAAACAAACAGG | 2844 |
| hs132687649 | CCATTAACCTTATCTTTGAAAGG | 2845 |
| hs132684605 | AGTTTCCTTTTGTTCTCTGGAGG | 2846 |
| hs132689331 | GTAAGTTGTTGCTAAATTGTGGG | 2847 |
| hs132683397 | TTATGGGGAATTTAAAAGTGTGG | 2848 |
| hs132683994 | AACCATGATATCTCCAACAACGG | 2849 |
| hs132694073 | TTTTGAGCAAACGTTTATAGAGG | 2850 |
| hs132683792 | ACAGTAATTGGCACTGAAAGAGG | 2851 |
| hs132689799 | TAAATCTTAGACTAAAATGTTGG | 2852 |
| hs132692040 | ATTCCAGATAAGAAGACCCTTGG | 2853 |
| hs132686601 | CTTGCTTTACTCTTAAGCACTGG | 2854 |
| hs132688955 | TATATTATGCCCAAGGCACTTGG | 2855 |
| hs132693950 | TTACTTTCTTTAATCTACAAAGG | 2856 |
| hs132683634 | AGGTCTCCAGTGTAATTTAGAGG | 2857 |
| hs132687214 | TTCAAAGAGTACCATATAAGCGG | 2858 |
| hs132691375 | ACATAGACAAAGAAATAAGTAGG | 2859 |
| hs132690347 | GCAGCGTGAAAAAATCCTACAGG | 2860 |
| hs132694322 | CAGTACTTAAAAGTATTAAACGG | 2861 |
| hs132694083 | ATATTGCAATTAGTATCTATAGG | 2862 |
| hs132691728 | GTTTCCAAACCGGAACACTTTGG | 2863 |
| hs132685355 | TTCTTAGCAGAAAAACTCATAGG | 2864 |
| hs132684888 | TCAATACTATTAACAACCCCAGG | 2865 |
| hs132691017 | TCCTCACTATGAATTAGATTAGG | 2866 |
| hs132684291 | ATATTCTGCACTCCATCGTCAGG | 2867 |
| hs132690722 | CCAAGGTATAATCTATTTGAGGG | 2868 |
| hs132686758 | AGAGAAGTGGAAGGTTTAGAGGG | 2869 |
| hs132685792 | CTTCAAGCCCCCAGTGAAGTAGG | 2870 |
| hs132689349 | CTTGTTTCACAACATTTATGTGG | 2871 |
| hs132690926 | CAAAAAATCGACTCTTGGAATGG | 2872 |
| hs132693618 | TCTGACAAGTTGGCTTAAAAGGG | 2873 |
| hs132688696 | CTTTCCCTCACAGATCCCTCAGG | 2874 |
| hs132687768 | GCATCCAAATACCCCTCATAGGG | 2875 |
| hs132689808 | ATGTATCTGTTTATACAAGTTGG | 2876 |
| hs132683887 | TTTTCCATCTCTCATTCAGATGG | 2877 |
| hs132691064 | CTTTTGTTGTGCACGTATATGGG | 2878 |
| hs132689026 | GGGCATACATCCGTGTTACTAGG | 2879 |
| hs132685001 | ATAAGGGCAAATTAAAATGCAGG | 2880 |
| hs132688147 | CTGGGCAGAGAAGTCATGCTTGG | 2881 |
| hs132686143 | ACAGTGTTACATTTAATGCTAGG | 2882 |
| hs132688316 | AGCTTATGATCAGATGGTTAGGG | 2883 |
| hs132693890 | TATCTACTCTGCATGAAGCTAGG | 2884 |
| hs132687894 | AATAGACTATTTTGAAGCAAAGG | 2885 |
| hs132683815 | AGTACATTACAGAAAAAGGCTGG | 2886 |
| hs132692671 | TAGGCACTGTGCAAGTTAGTTGG | 2887 |
| hs132685067 | GTGTGTGTGTGTATTGTAGCAGG | 2888 |
| hs132691811 | ATTGTAAAGTCAATAAATAACGG | 2889 |
| hs132685785 | TTATCAAGATACTTGAAAGCAGG | 2890 |
| hs132684669 | AATTCTGCTCTTGAGAAAAGAGG | 2891 |
| hs132685572 | TTTGTCACAACCCTAGAAATGGG | 2892 |
| hs132689033 | GGTGTAACAAAAAGTGATAATGG | 2893 |
| hs132684489 | CCATCATTTGCAGGGCTGGAGGG | 2894 |
| hs132694181 | ATGGAGATTGTAATATTTGGTGG | 2895 |
| hs132691812 | TTGTAAAGTCAATAAATAACGGG | 2896 |
| hs132687684 | ATTCCCTTATTTAGGGTAGAGGG | 2897 |
| hs132689825 | TTACTTGCCTTTGTAGGTAGAGG | 2898 |
| hs132683402 | AGTCTCTAATAGCAAACAAAAGG | 2899 |
| hs132689053 | AGGTCAGTCACTGGACCCTCAGG | 2900 |
| hs132691948 | CTGACTTTATTTTGTCCCTAGGG | 2901 |
| hs132687771 | GGCTTAGTCCTCAATAAGTAAGG | 2902 |
| hs132693705 | GCTGTGTCTATGGGGTTATAGGG | 2903 |
| hs132684969 | TGTGTGGGAAACCCTGAGAATGG | 2904 |
| hs132692005 | GGTTTCCAACAAGAGCCCTCCGG | 2905 |
| hs132688288 | TCTACTCTTGGGCTTATTCGTGG | 2906 |
| hs132694267 | AGAAGGTGTGAAAGAGAAGTGGG | 2907 |
| hs132692537 | GTAAGGATTTTGAAACTTGGAGG | 2908 |
| hs132688804 | AATTCATGATTTTAGTTGGAGGG | 2909 |
| hs132690157 | CAGTTCCCATTAGTGAGGAATGG | 2910 |
| hs132692545 | TTATGGATTGTTTGACTGGAGGG | 2911 |
| hs132685656 | CCTGTCTCCTAAATTTTGCATGG | 2912 |
| hs132692909 | ACAAAAGCTTACATTCACTTTGG | 2913 |
| hs132691901 | ACAAGTCTACTGGAAGACTTTGG | 2914 |
| hs132684104 | TCATCATCCGGGATTCTTGTAGG | 2915 |
| hs132686249 | TTTTTTTTGTGTGTGTTGGGGGG | 2916 |
| hs132692647 | CAGCCAGCTTTCCAGAAGGCTGG | 2917 |
| hs132686810 | ATGTTCGTAACTGAGAGTTAGGG | 2918 |
| hs132692781 | TGTACATAAAAAACTGGCCTAGG | 2919 |
| hs132693059 | TGTCAGGGTCCTGGTGATAATGG | 2920 |
| hs132685030 | AGAAACAGACAAGATTACTTTGG | 2921 |
| hs132685047 | TATAATTTTTCCTAGAATGAGGG | 2922 |
| hs132690594 | TCTCTTTAGTTAAGTCCAATGGG | 2923 |
| hs132688916 | TACGTTATTTAGCTCCCTTAGGG | 2924 |
| hs132685472 | TTTTTACCTGAGTTGAGAAAAGG | 2925 |
| hs132693663 | ATTCATAAGAAATTTTTCAATGG | 2926 |
| hs132690104 | GAGCTAAGTGCTGACTTAAAGGG | 2927 |
| hs132689588 | TTTTCATTCCTAATGCCCTAAGG | 2928 |
| hs132690237 | CACTTTTAGTATTAAGTAGAGGG | 2929 |
| hs132687243 | TATTGTAGCCAGATCTTTGGTGG | 2930 |
| hs132684617 | TTAAAACGTGTATTTAAAAGTGG | 2931 |
| hs132687921 | TGCCTTATACTACCTGACTCTGG | 2932 |
| hs132685415 | CCTAAGCATCTTTTTTCAAGCGG | 2933 |
| hs132684707 | CAGAATCTTCAACATACAAATGG | 2934 |
| hs132694248 | ATATAATCCATCTTTTAAGAAGG | 2935 |
| hs132693611 | AGATGACAAGTGAATCTCATAGG | 2936 |
| hs132687417 | GATTTCCAACCACTTTAACTTGG | 2937 |
| hs132687049 | TAGCAGTGCTACTAAGTGAATGG | 2938 |
| hs132684540 | TCATATGGCAAACTAAAGAAAGG | 2939 |
| hs132689453 | GTGGGAAGTACAATAGCAACTGG | 2940 |
| hs132693779 | GTATACAATTGGATTCTGTCAGG | 2941 |
| hs132685150 | TCTTTCACTTAAAATAGCTCTGG | 2942 |
| hs132684541 | CATATGGCAAACTAAAGAAAGGG | 2943 |
| hs132683819 | TTAAAATATCTTAAGCAGTCAGG | 2944 |
| hs132686595 | TGATATCCTCAGCCAAGTATAGG | 2945 |
| hs132686610 | TGCTCCCCTCAAAAGTCCCTTGG | 2946 |
| hs132690663 | GTATCCATCCAAGACTGAAATGG | 2947 |
| hs132691870 | AGTTTTTCCCTTTCACTCATCGG | 2948 |
| hs132687877 | TGAAGAATAAACAGGCCTTTGGG | 2949 |
| hs132686842 | GGGAAGATCAAAGAAAAATCAGG | 2950 |
| hs132684293 | TCGGGCATAAAGCATTTCCTTGG | 2951 |
| hs132691275 | TCTTACTTAAAGGACTGATTCGG | 2952 |
| hs132685270 | TCAGCACTAGCAGCACTTGTTGG | 2953 |
| hs132687146 | ATTACTTTGTCAGTACTTCAGGG | 2954 |
| hs132684833 | TTAAAGCCACATCCACTGATAGG | 2955 |
| hs132691012 | TGCTAATTAATGGGGACCCATGG | 2956 |
| hs132685201 | GCACACTAAAAGGCCTATAGAGG | 2957 |
| hs132686866 | TGAGAGAGAAGACTTGCAAAAGG | 2958 |
| hs132683687 | ATTATTTCCTCTTTTCAGACTGG | 2959 |
| hs132693684 | TGCCAGTTATGGGCTTAAGATGG | 2960 |
| hs132684736 | ACGTACAATGTCGTTCTTGAGGG | 2961 |
| hs132694063 | TTATGTTGCAATTTGAAGACAGG | 2962 |
| hs132691969 | TTACAGTCATAGTAGGTTGTGGG | 2963 |
| hs132684039 | CATGGGACCCGCCTGTTCAGAGG | 2964 |
| hs132692015 | ATAAATTTACAAGGGGCCTATGG | 2965 |
| hs132684290 | CACTCCATCGTCAGGTAAGAAGG | 2966 |
| hs132686847 | AATCAGGTCATGGGGCTTTGCGG | 2967 |
| hs132683646 | ATACTTCTTTGCAAACCAAAAGG | 2968 |
| hs132692327 | GCCTCCTCCAGGAAGATTTGAGG | 2969 |
| hs132691704 | CTCCAGCTGCATTTATATAGAGG | 2970 |
| hs132685036 | ATTTGAGGATGATATTCAACAGG | 2971 |
| hs132685582 | ACTAGCATCTGACAGCCTATTGG | 2972 |
| hs132687442 | GTTATTCATTCAGCAAAAGAAGG | 2973 |
| hs132694292 | TATTTGGTCCCACTGATGAATGG | 2974 |
| hs132691900 | TCTAGTCTAAACAAGTCTACTGG | 2975 |
| hs132693945 | GCAACACATACAATAAATGTAGG | 2976 |
| hs132686487 | GATCATTCATCCCTAGGAACAGG | 2977 |
| hs132684518 | CATTTTGATGAAGCGATGTAGGG | 2978 |
| hs132685793 | TACTTCACTGGGGGCTTGAAGGG | 2979 |
| hs132687204 | GTATGACTCTGCTTTATTGGAGG | 2980 |
| hs132688477 | AAACACACAGGACAAGAAGATGG | 2981 |
| hs132688663 | TATTTACCAATTACTGACATAGG | 2982 |
| hs132684847 | CTACGCATGCATAGAAAACTAGG | 2983 |
| hs132692977 | TGCAAGAAAGATACAGTCTAGGG | 2984 |
| hs132689649 | ATTAGGGTATATTTCCCCTCTGG | 2985 |
| hs132687091 | CTGATCATTTATCCTTTTAGCGG | 2986 |
| hs132689933 | TATTCTCTCATCTCATAAAGAGG | 2987 |
| hs132691301 | TCACTTGTATTTATACAGAATGG | 2988 |
| hs132687460 | CCAGGAACATGCTATATAGCTGG | 2989 |
| hs132692691 | CTTTATTGTAGCATGACTTAGGG | 2990 |
| hs132685098 | TCAGTTCTTACTTCGTAGAATGG | 2991 |
| hs132690345 | ATGAGTTTGGTAAGAAAAAACGG | 2992 |
| hs132688208 | CCTGCTCCATAACAGGCAATAGG | 2993 |
| hs132693519 | AAATGAACAGACTTTGGTACTGG | 2994 |
| hs132686006 | TGAATAATATTGGTTAATATGGG | 2995 |
| hs132684299 | AGCTCTGGATTGTTTAAGGATGG | 2996 |
| hs132689524 | TCACTTAATTAATTAAAGCCTGG | 2997 |
| hs132692369 | ATAATTGCTGACATTTAAAACGG | 2998 |
| hs132691269 | AGTCCAGTTAAAGGTAGCTTGGG | 2999 |
| hs132690203 | TTCTTAAGCACAATTCTGATAGG | 3000 |
| hs132692249 | ACATTTAAAATGAAAACAATGGG | 3001 |
| hs132683431 | TTTACTTGAAAACTGTTCCCTGG | 3002 |
| hs132692520 | AATAAGTGATAAATAACAACAGG | 3003 |
| hs132693665 | TTCAATGGCAAAATGAGGCTTGG | 3004 |
| hs132685008 | CTTTGGCAATAGGATTCAAATGG | 3005 |
| hs132687232 | ACCATAATGTTGTTGAAGATGGG | 3006 |
| hs132684868 | GGGCACAGCTACCAGGAAAAGGG | 3007 |
| hs132688169 | GTGTGGCTCTGGTTTTCGCCAGG | 3008 |
| hs132685087 | TTTCTTTTTCTTACTAGTAGAGG | 3009 |
| hs132693554 | TAACAGTATTAAGATCATAAGGG | 3010 |
| hs132689032 | CATTTTTTAATACTCAAAATGGG | 3011 |
| hs132694185 | CTTCTCATATCCCTATGTTCAGG | 3012 |
| hs132691859 | CTGGAGCATTTAGAGTAAAAGGG | 3013 |
| hs132686969 | TGAGAACACCTCACTATTCACGG | 3014 |
| hs132687390 | AACCTCATCATATATAATGATGG | 3015 |
| hs132693697 | TCAGCTAGAAAGCAGCTAATGGG | 3016 |
| hs132683715 | TTTCTGTCTGTGCTAATACTTGG | 3017 |
| hs132687999 | ACTAGCCAGAAGGAGCAGTATGG | 3018 |
| hs132694340 | TTTTTCTGAATGTTAGTCCATGG | 3019 |
| hs132683581 | GCAAACGCCACTTCTTTCTCAGG | 3020 |
| hs132684047 | TCTGAACAGGCGGGTCCCATGGG | 3021 |
| hs132691277 | TTGGTTAGTTTATCAACCCCTGG | 3022 |
| hs132691303 | TGAGCATGAGTCTTACAGTATGG | 3023 |
| hs132691731 | AGTAGCAGAACTTTTGTTGGTGG | 3024 |
| hs132691726 | ATAACTATACCAAAGTGTTCCGG | 3025 |
| hs132692845 | AGACTAGCTCTTATTACCCTTGG | 3026 |
| hs132685230 | GTAAATTATTTTCATACAAGTGG | 3027 |
| hs132689326 | AATCCCCCAAGAGTGCTCTATGG | 3028 |
| hs132692944 | CTGTGCCTATCCTAATAAGCAGG | 3029 |
| hs132694268 | TAGAAGGTGTGAAAGAGAAGTGG | 3030 |
| hs132693373 | CTTACCACAGATATATTCCTAGG | 3031 |
| hs132691997 | GCCTAGATCCTGACTGTCACAGG | 3032 |
| hs132683326 | TCTGACTTTTAGATGAAAAGAGG | 3033 |
| hs132692257 | TGATATTTGAAGTCAAGAACCGG | 3034 |
| hs132690841 | TAAGTATCTTAAAACCCTAAAGG | 3035 |
| hs132687916 | TTTCAGACAAGAAAAGCTTTGGG | 3036 |
| hs132685423 | GCAAATCTATCTAGAAAAAAGGG | 3037 |
| hs132690603 | AATTTTAAAGGGAATTAAGATGG | 3038 |
| hs132690674 | GCATGTGTGATAAATAAATTGGG | 3039 |
| hs132687289 | ACTCTTTGCAGCTCTTCAGCTGG | 3040 |
| hs132686294 | TTTGTACTATCAGCTATAGATGG | 3041 |
| hs132690499 | GAGTCTGTCACTTTAACAAATGG | 3042 |
| hs132691244 | TGATGATGCTGAGGACTAGATGG | 3043 |
| hs132692663 | GGAGGCCATTGAACAATTTGAGG | 3044 |
| hs132683637 | GTAGGCAGCTGTATGGAAACAGG | 3045 |
| hs132688402 | TTAATTGTAATCCTTAGCCTTGG | 3046 |
| hs132684999 | AAGAATCCTTCCTTTCATAAGGG | 3047 |
| hs132692244 | ATGTTGTCCTTTTTCTTGCATGG | 3048 |
| hs132694138 | TCTTGCCTGAAATTGGTAAGAGG | 3049 |
| hs132683884 | TGAACTATCTTTATCAAATGTGG | 3050 |
| hs132686078 | CTAAAATCTCATCAGCTCCTAGG | 3051 |
| hs132685395 | GAGATTTTAACATATTAGAATGG | 3052 |
| hs132694198 | GCTACCCTCTTCTCTCTTCGTGG | 3053 |
| hs132690634 | CTTGCCCTCTGATGTCCAGCTGG | 3054 |
| hs132689621 | TTAACGATGACTGAATTGATAGG | 3055 |
| hs132684937 | GTAACTCCTGGTACACTTGTAGG | 3056 |
| hs132693748 | GATGCTGGCTTCCATCCTACTGG | 3057 |
| hs132690056 | TTAAATGTCTGAAAATGGATTGG | 3058 |
| hs132685325 | AAGAAGCTATAGAAATAGATTGG | 3059 |
| hs132689894 | TATCTCTTATATGCATCAGTTGG | 3060 |
| hs132688035 | ATCCAATTGTCATTTCTAAGAGG | 3061 |
| hs132686466 | TACCAGATTGAGGATATTAGAGG | 3062 |
| hs132690502 | GGTGTATGAGATAAAACATAAGG | 3063 |
| hs132692761 | AAAGGTGATGTAGGTGTGAAGGG | 3064 |
| hs132693683 | GCCCATAACTGGCAACCAACAGG | 3065 |
| hs132689024 | GGATGTATGCCCTCAGAGAATGG | 3066 |
| hs132692437 | ATAAGGACGTGTCTGCTTGTGGG | 3067 |
| hs132692436 | TCCTTATGAGATGCATGCCCTGG | 3068 |
| hs132690129 | GCTGAGCACAATTACCATTACGG | 3069 |
| hs132684602 | TTTTGTTCTCTGGAGGGAGGTGG | 3070 |
| hs132685108 | CGATTAGGTTTGGTGGTTGGAGG | 3071 |
| hs132691367 | GTCAGCCAGAAAATATATATAGG | 3072 |
| hs132684802 | GGTCAGATAATTGAGTTAGAAGG | 3073 |
| hs132689253 | TTTTTTTCCTTGTTGAGTAAAGG | 3074 |
| hs132684595 | CAGTCTATGCAGAGATTCAATGG | 3075 |
| hs132683512 | CACTCTCTTGGAAATGAGAAAGG | 3076 |
| hs132683800 | TGGCCTAGGGAATAAATAATGGG | 3077 |
| hs132691755 | TCTGCCGCTGATGGTTTGTTCGG | 3078 |
| hs132684793 | CTCTTCCTCTTTTCTCACATGGG | 3079 |
| hs132691153 | TTTCAAATGATCCTTTTGCTTGG | 3080 |
| hs132687318 | TTTCTCAATGAACTGAGTAATGG | 3081 |
| hs132690719 | CCTCAAATAGATTATACCTTGGG | 3082 |
| hs132684859 | ATATGAGAGTCTCTGAATAAGGG | 3083 |
| hs132689727 | TAATACTTTGGAAATTGAAAGGG | 3084 |
| hs132684598 | ACCTCCCTCCAGAGAACAAAAGG | 3085 |
| hs132688609 | AGTGTGGCTGGGAGTCTACCTGG | 3086 |
| hs132693009 | TGTTTCCACTGGGAATATATAGG | 3087 |
| hs132692401 | GTATGCATATGTACATAAATCGG | 3088 |
| hs132683982 | GATTGACACCCGTAGCCTATGGG | 3089 |
| hs132693303 | CCAGTAGGTGGGTCACTCATTGG | 3090 |
| hs132690099 | ACAAGTGCAGATTTTAGCCTTGG | 3091 |
| hs132692080 | TTTTTTCATATATCATCAATGGG | 3092 |
| hs132689920 | GATTATCATGTGCGTTTCCATGG | 3093 |
| hs132685376 | AAGCTGAAAGGTAAACAAATCGG | 3094 |
| hs132685789 | ATAGAACTTTCTATGTATAGAGG | 3095 |
| hs132693368 | CCAGAGAAAATGAAGCTAAAGGG | 3096 |
| hs132694260 | TATCACAAAAAGAGAAATAAGGG | 3097 |
| hs132684931 | CATAGTATGCAGATTTTAAGTGG | 3098 |
| hs132685055 | AATTCCCTGGTTTTGCTCCCCGG | 3099 |
| hs132688408 | GTTTATTATTGATAATCTAAAGG | 3100 |
| hs132686605 | AGATGAACGTTTCTTTTCCTAGG | 3101 |
| hs132684850 | TGTAACCACTTACACACTAATGG | 3102 |
| hs132692588 | GTACAGTGTTCTTTATCGTATGG | 3103 |
| hs132686480 | GTTCCCAGATTCCTGTTCCTAGG | 3104 |
| hs132686855 | GCTGTGAAGGTTCAATAAATAGG | 3105 |
| hs132689846 | ACGTTCCCATATAATAGAAATGG | 3106 |
| hs132688189 | CCACTGGGCATGCTCAGAATAGG | 3107 |
| hs132693920 | TCTGCCATACATAGGTCTTAGGG | 3108 |
| hs132694087 | AGTGTCTCCTTTGATAGTGTTGG | 3109 |
| hs132691761 | AATAGTTAAGATGTTGTATGAGG | 3110 |
| hs132683544 | ATTGATTGATAAGTTATGCCAGG | 3111 |
| hs132687540 | GGAGGTTGACAAGGGAAAAAGGG | 3112 |
| hs132694336 | TTTAACTCACCCTTTCTAAGAGG | 3113 |
| hs132684779 | CTACAGCAAGATGTTCCCTTAGG | 3114 |
| hs132691090 | GCATGTCATATACCTGGTTATGG | 3115 |
| hs132689763 | CCTGCTTGAGCTATTGTTGGAGG | 3116 |
| hs132693480 | TTAATATTGTCAAAAAAGCTTGG | 3117 |
| hs132684496 | CTACTTTCATATTTTTAGGTTGG | 3118 |
| hs132691094 | AAGACCTCCCTCTCTTAGCTGGG | 3119 |
| hs132690819 | GGGAAATCTGAGAGTACAATTGG | 3120 |
| hs132686111 | AGTTAACCTTTCCATCCTCTTGG | 3121 |
| hs132691644 | ACGATATGTGCAAAAATTCAGGG | 3122 |
| hs132687870 | TCTAGTTAAGGTTTTTCAGCAGG | 3123 |
| hs132687595 | TCTTGCTATGTATGGCCAAACGG | 3124 |
| hs132685358 | AGGTAGCTCACAGAATAATCAGG | 3125 |
| hs132691281 | TTACATTGTAATGCTTGTAATGG | 3126 |
| hs132692029 | TTTTCTATCACAGATTTACATGG | 3127 |
| hs132692971 | GAAGGCCTAGTGAGGAAAGATGG | 3128 |
| hs132691677 | TGACAGAAACGCTCTTTCAATGG | 3129 |
| hs132689006 | ATAAAATGAAATAAAAGCTTCGG | 3130 |
| hs132691079 | CTATCATTTGCAAAGCACTATGG | 3131 |
| hs132689157 | GAATACACATTAGAAACAATTGG | 3132 |
| hs132692248 | TGTAAATCCTCTCATTAAGATGG | 3133 |
| hs132694309 | TCTTGAATGGTCACTTAAAACGG | 3134 |
| hs132689726 | GTAATACTTTGGAAATTGAAAGG | 3135 |
| hs132693042 | TAGATTATAGAAGTTTACATTGG | 3136 |
| hs132693868 | CACTAGCTACACTATTTTGGAGG | 3137 |
| hs132683736 | AGAGTCAGTCTTTTAGAAAAGGG | 3138 |
| hs132691142 | AGACAGCTGATTATATAAGTTGG | 3139 |
| hs132689884 | ATTAGTCACGTACATACATATGG | 3140 |
| hs132687598 | AGTGCACAAGTCAACCCGTTTGG | 3141 |
| hs132690169 | GAGTGAAAGTGAGGCATTGAGGG | 3142 |
| hs132692957 | TTTTTTTTCCTGAGAGTAAGTGG | 3143 |
| hs132686821 | GTGGCTTTGGTAAGGTAAGTTGG | 3144 |
| hs132685165 | GATATTTGAGGCAAATCCTTCGG | 3145 |
| hs132683623 | CAGCCATGTTAATAATTAGTAGG | 3146 |
| hs132683836 | CAATAATGTTCCTCTTTTAGCGG | 3147 |
| hs132683776 | CCTACTAAACGAATTATAAAGGG | 3148 |
| hs132685550 | AAATCATCAGTAATACATATAGG | 3149 |
| hs132693265 | GTAAACATTTTATAGACAAAAGG | 3150 |
| hs132689749 | ATCATTGTGGCCAGCTCCCAGGG | 3151 |
| hs132693951 | TACTTTCTTTAATCTACAAAGGG | 3152 |
| hs132688643 | TGATAAGGTTAACAATCCTTGGG | 3153 |
| hs132694002 | TTTGAATTACTATTTTTCACTGG | 3154 |
| hs132694294 | GTTTAGGCTTGCTTCATTTGCGG | 3155 |
| hs132690140 | TTCATTACATGGATAAGCATTGG | 3156 |
| hs132691577 | TGTTTATTTGGAATTCCCCTTGG | 3157 |
| hs132690477 | GCTTCTCTTATTCAGACTGTTGG | 3158 |
| hs132687250 | AGGTTTGTACTACTACATATAGG | 3159 |
| hs132691790 | AAGCCTATCAAAAGTGAAATGGG | 3160 |
| hs132685138 | AGGAATTCCAAGCATATAATGGG | 3161 |
| hs132693933 | ATTAGAACCAAATTTGGAATGGG | 3162 |
| hs132688400 | GATAGCTTAAAGCTCAGAAATGG | 3163 |
| hs132686851 | CTAAATGCATGTACAAACTAAGG | 3164 |
| hs132693435 | AGTATAGTGCTTTATAAAAAGGG | 3165 |
| hs132694381 | GTAAGACAAAACTCATTAAAGGG | 3166 |
| hs132690680 | GATGGAGCTTGCCTTCCATCAGG | 3167 |
| hs132691968 | TTTACAGTCATAGTAGGTTGTGG | 3168 |
| hs132689118 | GTTATAACACAGGTAACTATAGG | 3169 |
| hs132694303 | CCATAGTTACTTTTAAAAGAAGG | 3170 |
| hs132688841 | TTATTGTATCTATATAAGATTGG | 3171 |
| hs132686046 | ATAAAGAATGAACTATCTATAGG | 3172 |
| hs132691443 | GTGGCATTCATGTTAGCCTTAGG | 3173 |
| hs132688467 | CCAAATAAGTAGTAAACAAAGGG | 3174 |
| hs132691732 | TGTAGTAGCAGAACTTTTGTTGG | 3175 |
| hs132693329 | TATTTTATAAGTTATTTGAATGG | 3176 |
| hs132689046 | GGATAAAAACAGAATGTTGATGG | 3177 |
| hs132683354 | GATTTGAAGGAGGCTAGAATAGG | 3178 |
| hs132685406 | AAAGTTATGGTACAATTCCTAGG | 3179 |
| hs132685393 | TTTCTAGGCAATCTGCTAGCAGG | 3180 |
| hs132686181 | GTCTGTGTTTGAATTAAGAATGG | 3181 |
| hs132687854 | GGACTTTTTCCCTATCAGTCAGG | 3182 |
| hs132684982 | GATTTCGTTGACCCTTAACTAGG | 3183 |
| hs132684776 | TTAATGAATTTTTATCCCCCTGG | 3184 |
| hs132684079 | GCGGAAAGCCGGGGTAACCGTGG | 3185 |
| hs132693449 | CCATAGTGCCTGACAAAACCTGG | 3186 |
| hs132689702 | TTATAAGCATTCTTCTGCCTGGG | 3187 |
| hs132683722 | TTAAAACAGAAATAAAGTTTCGG | 3188 |
| hs132690851 | TATATCTGACCTTTATTGACAGG | 3189 |
| hs132685739 | TGTAGCTATCACTTACTTCGTGG | 3190 |
| hs132693084 | CTGTCTGTTTGGAGTGGGCAGGG | 3191 |
| hs132692461 | TGTGAACTCCTCCACCTTGAGGG | 3192 |
| hs132687601 | TCAGTGATATTCAGTATGATTGG | 3193 |
| hs132692651 | GGAGATACAGAGTTTTATGTTGG | 3194 |
| hs132693909 | ATTCATGTGCAACCTAAATACGG | 3195 |
| hs132692186 | GATAATTACTTCACTCTACATGG | 3196 |
| hs132693434 | ATACTGTTTTTAGTTGCAAATGG | 3197 |
| hs132686653 | TAGCAAAGAGGAGTAGGTATTGG | 3198 |
| hs132690695 | TTAGCTCTCAAAAGCACATTGGG | 3199 |
| hs132691822 | TATTTTCCCCCCATGGGTAGTGG | 3200 |
| hs132692894 | ATAGACTGTAGGAAGTATAATGG | 3201 |
| hs132683656 | ACACAGGGCCTGGATTATAAGGG | 3202 |
| hs132689474 | CACTCTTCCTGTGACCCGACTGG | 3203 |
| hs132693332 | AGCCTATTGTAGCTGCCTAATGG | 3204 |
| hs132683492 | TTTAGGACATATTTAGAAAGTGG | 3205 |
| hs132684081 | CTCCTTCTCGCGGGGCTCGAGGG | 3206 |
| hs132690066 | GTACACACCCCGTCTCTAATGGG | 3207 |
| hs132686259 | AAATATATCTTGACAGCAAATGG | 3208 |
| hs132691729 | TTTACACTATGTTTCCAAACCGG | 3209 |
| hs132686988 | GTGCACTCATTTATGCAAACTGG | 3210 |
| hs132690921 | GGCAGCGGTGGCTAATACTTAGG | 3211 |
| hs132684843 | TTTTTGTAGGAGCTTGGGCTAGG | 3212 |
| hs132683734 | GTCAGTGCTGAAAACATGTTTGG | 3213 |
| hs132688239 | ATAATAGGTTATTGGAAGGTAGG | 3214 |
| hs132684552 | GCAGTGGTGATTCCAATCATTGG | 3215 |
| hs132689011 | GTGCACACTCAAGCTGTTGATGG | 3216 |
| hs132690356 | GCTTCATAAATTTCTTTTGGTGG | 3217 |
| hs132685173 | ACAAGTTACAGAGGGTTAAACGG | 3218 |
| hs132686948 | GGCTGGCTACACACCTTCATAGG | 3219 |
| hs132686021 | GCTACTTAAGAGAAGGGCTTGGG | 3220 |
| hs132687848 | AAGACGGTTGATATTTCTTAGGG | 3221 |
| hs132693816 | GTACATGGATTCAGGCATATTGG | 3222 |
| hs132691970 | GTAGGTTGTGGGAGAGATGCTGG | 3223 |
| hs132693441 | GTACAAACACCATAACCAAATGG | 3224 |
| hs132684238 | GGTACTTGTCAGGTTTATAAGGG | 3225 |
| hs132692868 | GATAAAAGTCAACAGCTGATTGG | 3226 |
| hs132693518 | ACAACAAAATGAACAGACTTTGG | 3227 |
| hs132688610 | GAGTCTACCTGGATTATTGATGG | 3228 |
| hs132684422 | AGATCTTTGCATGCAGGCATTGG | 3229 |
| hs132694034 | TTGGCTGCTGACCCATTCATGGG | 3230 |
| hs132692660 | AATGGCCTCCTATTGACCTTAGG | 3231 |
| hs132685359 | GATTATTCTGTGAGCTACCTTGG | 3232 |
| hs132686583 | AAGACTAGTCAGATCTCTAATGG | 3233 |
| hs132690993 | TCTTTCCTATTGAAGGCTATGGG | 3234 |
| hs132687356 | AATCAAAGGCTGATTTTAAGTGG | 3235 |
| hs132686314 | ATTAGTGTATTTTTTCAGTCCGG | 3236 |
| hs132686389 | ATAGGAGACGTCCAAATGATAGG | 3237 |
| hs132687608 | TACTACCCTAGAGAGCAATTAGG | 3238 |
| hs132692636 | TTAGTTGTTAATTTAAGTAATGG | 3239 |
| hs132684528 | AGGCAAACGGAAACTGCATTTGG | 3240 |
| hs132683447 | TTTATATTCCTTAGTCCCTCAGG | 3241 |
| hs132690725 | ATTGAAGTTTATCAATTAGCAGG | 3242 |
| hs132686941 | GAATTTATCATTCTTCTGAATGG | 3243 |
| hs132685608 | CTAAATTATCTGATTTTCATGGG | 3244 |
| hs132684197 | TGTTGTGGTTCTGGGTACTAAGG | 3245 |
| hs132688677 | GAGAGCTTCTTATTGAGAAAGGG | 3246 |
| hs132691374 | ATTATAGTACGCACTAACTTAGG | 3247 |
| hs132691088 | ATGACATGCAGCATTTTAAAGGG | 3248 |
| hs132687485 | TTTCTTGCTGGCTTCTGGCGTGG | 3249 |
| hs132692209 | CATTTTGATGTCATTACCATAGG | 3250 |
| hs132688660 | GGCTTGAATGTGACATTGACTGG | 3251 |
| hs132687958 | CTTGTCTGTGTTACAGCAATGGG | 3252 |
| hs132691882 | AGTTTCTTAGTTTTGAGCTATGG | 3253 |
| hs132686426 | TCTTGATCTTTGAATGAAGTTGG | 3254 |
| hs132685456 | CTACTAAATGGAACATTGAATGG | 3255 |
| hs132689748 | AATCATTGTGGCCAGCTCCCAGG | 3256 |
| hs132692021 | TTTTATTGCCAAAGTTTCCTAGG | 3257 |
| hs132685647 | CAAATGTTATGTTTGTTGCCAGG | 3258 |
| hs132693781 | ACAGTCCTTTTTATACATAGTGG | 3259 |
| hs132689101 | AACTAACTCATTGTTTAAAGAGG | 3260 |
| hs132683713 | TTTAATGTTTAAATTTTGAATGG | 3261 |
| hs132689183 | GGATTCCTTCTCTTACAAACTGG | 3262 |
| hs132689804 | AACTCAGGCATCATTCAGATTGG | 3263 |
| hs132694384 | TGTATCAGCTTGTTTCAGATAGG | 3264 |
| hs132687300 | TCAAACTTGCTGTAACCCTATGG | 3265 |
| hs132685534 | TGAATTCTAATGACTGCAATGGG | 3266 |
| hs132691591 | TCAAACTTGACCATATAAATCGG | 3267 |
| hs132683347 | TTATTTCTCATATTGACTAAAGG | 3268 |
| hs132683320 | ACATGGGCCTGATCTCACTATGG | 3269 |
| hs132689697 | TATAGACTCTGATTGAGAAATGG | 3270 |
| hs132689445 | TCTACAGTTCTTTTGCCCTCTGG | 3271 |
| hs132690816 | ATAAAACCTCAGTATGAAAACGG | 3272 |
| hs132684718 | TTATCAGGATATGTTTATAAGGG | 3273 |
| hs132688782 | CATTAACTGTTTCTATCAAAGGG | 3274 |
| hs132688377 | CACAACATTTAGCAACAGATTGG | 3275 |
| hs132684288 | GACGATGGAGTGCAGAATATGGG | 3276 |
| hs132691451 | GTAGGGGATTTGGGGTTGAATGG | 3277 |
| hs132692890 | AGAAAAAAGAAAAAAATAAGAGG | 3278 |
| hs132690423 | TCCCAGATCTGAGTCCTGTAGGG | 3279 |
| hs132687109 | GGGGCCACTAGTGTAAAAAAAGG | 3280 |
| hs132685746 | GGCCATCTCACAAAGCTCATTGG | 3281 |
| hs132691641 | CTCCGTTACACGTTTACAAAGGG | 3282 |
| hs132685378 | TCTTGTGGATTTACATTGCCAGG | 3283 |
| hs132693773 | TATTGACCTTTAATATAAAACGG | 3284 |
| hs132690897 | TTATACTTTGTTACTTCAAAGGG | 3285 |
| hs132685989 | AACTTTTTATTGTCACTAAGAGG | 3286 |
| hs132690997 | GGAAGCCCATAGCCTTCAATAGG | 3287 |
| hs132686041 | ACATCTTATGACAAATCAATAGG | 3288 |
| hs132690949 | GTGCTGCTGCCCCTCAGCATGGG | 3289 |
| hs132692600 | CCTGCTCTCGTCTTTATAAGAGG | 3290 |
| hs132683705 | GCTTATTTTAAATTTAATGATGG | 3291 |
| hs132691872 | TATGAAATATGTCAAACAACTGG | 3292 |
| hs132693277 | GTTCCCATATGAACACTGTTTGG | 3293 |
| hs132687923 | GCTAAAATGTAAGAGATGTTTGG | 3294 |
| hs132687642 | CACTTTCATTTATTCGGGGGAGG | 3295 |
| hs132683522 | AGAACTGTAGTTTCTCCATCAGG | 3296 |
| hs132685099 | CTACTTCTCAGAAGCTCTGTTGG | 3297 |
| hs132686860 | AGACAGGGCTTAGCTATATTCGG | 3298 |
| hs132691290 | CATTGAATGATATTTACAATTGG | 3299 |
| hs132688235 | CAGTTTATCTCCTAAATATGAGG | 3300 |
| hs132686034 | TTAAGATATTTAGTATATAGTGG | 3301 |
| hs132686738 | AATCAAGGCTAAGCTGCATTAGG | 3302 |
| hs132694153 | CTCCATATTCCTAAGCCAACAGG | 3303 |
| hs132688845 | CCCTGCAGAATTGGGATTGAGGG | 3304 |
| hs132687224 | GGATTTCAGTTGGAAGGCATTGG | 3305 |
| hs132686949 | CTTTTTGCTGATTTCCCTGTTGG | 3306 |
| hs132689165 | CAAAATGTATTGCTGTGAAAGGG | 3307 |
| hs132687066 | GGACATGGAACTTACTTGTTCGG | 3308 |
| hs132685940 | CAATATTTCTTTAGGTCAAAGGG | 3309 |
| hs132688489 | GCAACAGAATAGCAGATTAAGGG | 3310 |
| hs132692328 | CCTCCTCCAGGAAGATTTGAGGG | 3311 |
| hs132689899 | TGTTCTTTACACTTTTCAAATGG | 3312 |
| hs132686956 | TGTAAGAGAAAAGTACCAACAGG | 3313 |
| hs132690577 | TATTAAATAATCAAACAAGTTGG | 3314 |
| hs132694383 | GTATCAGCTTGTTTCAGATAGGG | 3315 |
| hs132685486 | TCACCGGCCATTTTCCTTTGAGG | 3316 |
| hs132684624 | GCAAACATTTTGATCAAAGTTGG | 3317 |
| hs132687615 | TTAGGTACTGTCATAGTGTTGGG | 3318 |
| hs132685127 | TTATCAGTTTGATTCATTAAGGG | 3319 |
| hs132683955 | TCCTTTGCATCTAATATGAATGG | 3320 |
| hs132692164 | TTTTAACTTAAATCATTGAATGG | 3321 |
| hs132688441 | GGAAGTGTGAATAAAAGTTAGGG | 3322 |
| hs132685854 | GCTCTTTACTCCAACAGAATAGG | 3323 |
| hs132685575 | TATTATGGATTTACAAAATGAGG | 3324 |
| hs132687229 | TTAATTTCCTCCAAAGCCTTGGG | 3325 |
| hs132691388 | ATTATATTAAAAAACTAGATTGG | 3326 |
| hs132685601 | AAAATATCCCTGATTATCATAGG | 3327 |
| hs132694160 | GTAACAGACACAAGGCTTAAGGG | 3328 |
| hs132687230 | TTTAATTTCCTCCAAAGCCTTGG | 3329 |
| hs132683962 | TTTGCCCCGGAGCCCGGCATTGG | 3330 |
| hs132686266 | TAAGTATTAGTTCTGTTGGTTGG | 3331 |
| hs132683439 | TTAGAAAGCTAATTTTATATGGG | 3332 |
| hs132685240 | CTCTCTACTGAAGTGATTGAAGG | 3333 |
| hs132689904 | CACATTACTTGGAAATTAAGTGG | 3334 |
| hs132689268 | GTTAAAAGGGAGCCAGAATAGGG | 3335 |
| hs132691869 | CATCGGTCTCTAAATAAACTTGG | 3336 |
| hs132686995 | CAAGCACTGTTGGTTTTCATAGG | 3337 |
| hs132689266 | CTGTGTTTTGATAGTTAAAAGGG | 3338 |
| hs132683403 | ATATTTAGCAAAAGTCATAAAGG | 3339 |
| hs132692310 | TGCCAGGGAGATGAAAATTAGGG | 3340 |
| hs132685132 | TTATAAGCCGGTCTCACAATTGG | 3341 |
| hs132693914 | TGTATCTTTTTTTTCCAAAACGG | 3342 |
| hs132685073 | GTAAAATCTGATTTTCTAAGTGG | 3343 |
| hs132687427 | CTTTTTATAGTGGTGGGGGGAGG | 3344 |
| hs132691637 | ACTCAGTTATAGGAAGTAACAGG | 3345 |
| hs132683291 | AAAACACTAACACATCATAATGG | 3346 |
| hs132686741 | CTCATTACTCTTTAACCAAAAGG | 3347 |
| hs132685690 | TGTTCATTAATGACTGGCTCTGG | 3348 |
| hs132690136 | TACATTCTCATTTCATTACATGG | 3349 |
| hs132683932 | TGGTGTCTAGCAAAGTTAAAGGG | 3350 |
| hs132685315 | GTATAGAACTTTGTATTGTATGG | 3351 |
| hs132693103 | GTATTATATGTAAGTCTCTTCGG | 3352 |
| hs132691300 | AATTTACTCTCAAATTAAGTTGG | 3353 |
| hs132692355 | GCTCTCCCGCACAATGGCATTGG | 3354 |
| hs132685266 | ATTTTTTTAGTGCAGTGTTTGGG | 3355 |
| hs132689082 | GTAAAATAAATATTTAGAATGGG | 3356 |
| hs132693250 | CTGTTGTTCCTTAGTATTGAGGG | 3357 |
| hs132690549 | GAACTGGAGTTCAATTTGTTCGG | 3358 |
| hs132689996 | ATACAGTAGTCAGTTGAAATGGG | 3359 |
| hs132687908 | CCTGTTCATGTATTTTTGAATGG | 3360 |
| hs132688786 | TGTTGATCAGTCTCACCTTATGG | 3361 |
| hs132694356 | CTATGTAATACAGAATCTTTCGG | 3362 |
| hs132693903 | GAAGTAATCAACCTTGGAATAGG | 3363 |
| hs132684923 | ATATAAATTATACATTTAAGAGG | 3364 |
| hs132684014 | CTTTTCATGACTTTTCCCATTGG | 3365 |
| hs132691024 | TCAAGTTGTTTCCTGGGTGTGGG | 3366 |
| hs132688908 | TATTTTTTAAACAGATCAACAGG | 3367 |
| hs132687652 | AATGCATTTCAATAAATATGAGG | 3368 |
| hs132686772 | GGCCACACTTGGAATTGAAATGG | 3369 |
| hs132685304 | TTACAGCTTTGTGAAACAATTGG | 3370 |
| hs132686607 | GTATTTCAGGATTTCACATCAGG | 3371 |
| hs132688824 | TTAGTCTTATCCATCTTGCTTGG | 3372 |
| hs132684935 | GTTTTAATCTGTTATACTGCAGG | 3373 |
| hs132685051 | ACCGTCAGAGTAAGTCTTAAGGG | 3374 |
| hs132683391 | TGAGCCTTCTTTAATGGTGCTGG | 3375 |
| hs132683876 | ATGTTTCTCAAGGCAGGTTAGGG | 3376 |
| hs132687020 | CCAAGAACTGCAGCTCTACTTGG | 3377 |
| hs132688264 | TGATAAATGAGGTCAGATATTGG | 3378 |
| hs132689818 | ACTTATTGTTGGCTTTAAAAGGG | 3379 |
| hs132694306 | CGAAGGAGACAATTCACAAAAGG | 3380 |
| hs132687701 | AACTATCTATTAATATCATTCGG | 3381 |
| hs132683690 | ATAATAATACTGATCTCTATTGG | 3382 |
| hs132686671 | TAGTGAACCTGCAAATCAATAGG | 3383 |
| hs132686461 | CTAACTCTTAACCATTTTGAGGG | 3384 |
| hs132684976 | GTGCATTTGCCCCTAGTTAAGGG | 3385 |
| hs132685886 | GCAAGAAATTTCATGTAGTTGGG | 3386 |
| hs132687620 | GCTTTTGTCAAGCTAAAATCTGG | 3387 |
| hs132690535 | TCAGGGCATTCAGATCTATCAGG | 3388 |
| hs132693957 | GGGAAATTACTAATGAATGTTGG | 3389 |
| hs132693148 | ACTGGCACTTTTTAGCTGTAAGG | 3390 |
| hs132690665 | CCTTGATCATATTTTCTACAAGG | 3391 |
| hs132692987 | TTTCTAGCCATTCTGACAATTGG | 3392 |
| hs132690866 | CCAAAACAAATCAGTTTAAGAGG | 3393 |
| hs132683476 | CAGAAAATGTATCTTTAAAAGGG | 3394 |
| hs132689106 | CCTGGGGTTATCAAGATACTAGG | 3395 |
| hs132692696 | TTTTGTTCTGAAATTTTCCTTGG | 3396 |
| hs132687060 | GTAATTGTTTCACATTTAAGAGG | 3397 |
| hs132690106 | TTGCAACCGTAATCTGATAAAGG | 3398 |
| hs132690872 | TTTCTCATGGTACTTAACTAAGG | 3399 |
| hs132691472 | GCTTAGGTATTTCCTCATAAGGG | 3400 |
| hs132690656 | TTCAGTTGTATTAGTGGCAGTGG | 3401 |
| hs132689313 | GGGGGCGTGGGGCCAAACAGAGG | 3402 |
| hs132690642 | GGAAATTATGTGACACCAGCTGG | 3403 |
| hs132691576 | ACTTAGATTTGTTAAATATGAGG | 3404 |
| hs132685236 | AGGTCCTTATGGGTGTTTGATGG | 3405 |
| hs132687884 | CATTTGCAAAACAATTTAAGAGG | 3406 |
| hs132683528 | GGTAGATGTATATAAGGTTTGGG | 3407 |
| hs132692832 | GCCACTGCAGTCCTGAAGGTTGG | 3408 |
| hs132687228 | CACATTTCCCAAGGCTTTGGAGG | 3409 |
| hs132689187 | TTTTTTCTAAAACAGTAGATTGG | 3410 |
| hs132689029 | ACTCCAATTGTTATAAAAGAAGG | 3411 |
| hs132693916 | TTTAATGATATTGGAAAAAGAGG | 3412 |
| hs132686216 | CTTCCAACAGAGATTTTAGTTGG | 3413 |
| hs132692838 | AGTTTAATATATTTGATACTAGG | 3414 |
| hs132692085 | AAAAGAAAATTATTGTATAAGGG | 3415 |
| hs132685309 | CACTTGTAATCCATCCTTAAGGG | 3416 |
| hs132687582 | TGATTTCTTCAAAGGCCTGCTGG | 3417 |
| hs132690165 | GAACCCCATTCCTCACTAATGGG | 3418 |
| hs132687741 | TTAATCTATGATGAAGGAAATGG | 3419 |
| hs132686286 | AAGCTGATTGATTCATTAAGAGG | 3420 |
| hs132683782 | GTTTGTTTATTTGTTTCTGCAGG | 3421 |
| hs132690303 | AGAAAATTATCTTTAAAGAAAGG | 3422 |
| hs132688399 | TCTGAGCTTTAAGCTATCATTGG | 3423 |
| hs132684524 | TTATATGCATATATACAGTTAGG | 3424 |
| hs132683364 | TAGACTTTATGGAGGAAGATTGG | 3425 |
| hs132690624 | AAGATTTCTGAATGTAAGAAAGG | 3426 |
| hs132690915 | CCATATGATCTAAAATCTATTGG | 3427 |
| hs132690337 | ATACAGTGATCTCTTTTAAAGGG | 3428 |
| hs132691775 | ATATGCTCATGAGCTTCCTTTGG | 3429 |
| hs132685675 | GGAAAGATTTGAAAATTCATTGG | 3430 |
| hs132691141 | ACCAGTGGTTGACAGAAGTATGG | 3431 |
| hs132693682 | AGATGGAAGCCAGCATCAATAGG | 3432 |
| hs132692825 | GTATCTTCACCCCAACCTTCAGG | 3433 |
| hs132692366 | AAGCTTTTGTGCAAATTAGTTGG | 3434 |
| hs132692051 | GCCTCCCCTTATTTTTATGTAGG | 3435 |
| hs132686474 | GCGTAATGAAAAACGATAGAAGG | 3436 |
| hs132690876 | TATTTTGCAACAGTATAATAGGG | 3437 |
| hs132688153 | GGACCAACACAGAAATATATAGG | 3438 |
| hs132691887 | AAGCAAATCATCAGACTTAAGGG | 3439 |
| hs132690070 | GAAGAGCTAGAGGATTCCTTTGG | 3440 |
| hs132689446 | ACTGTAGACGGGTAAATAAAAGG | 3441 |
| hs132685252 | TTAAGGCTTTTATAATCATTCGG | 3442 |
| hs132689280 | TGAGGAAAGCTGGGTTTTAGTGG | 3443 |
| hs132689864 | ACCACAAGTGAAAAGCAGTATGG | 3444 |
| hs132687609 | GTTTTTGTGGATTCACTGCTTGG | 3445 |
| hs132693558 | CCCTTGTCTGATTTCAGTAAAGG | 3446 |
| hs132686362 | CATGGTTGCCTATTGACTTAGGG | 3447 |
| hs132686961 | GTGCCTGCTTTATCTGTGCTTGG | 3448 |
| hs132691162 | GAAACTCTGTTCCTGTAAACAGG | 3449 |
| hs132691792 | CTTTGTATTTTGTCGATGATAGG | 3450 |
| hs132686398 | AATCTCAATTGTTTGCCAAATGG | 3451 |
| hs132687408 | CCAAGACTATTACAATAAAACGG | 3452 |
| hs132692742 | AATTTGCATGAATATACAAATGG | 3453 |
| hs132692642 | AGGAGGCTCTTTCACTTTTGCGG | 3454 |
| hs132684535 | CTAAACAATTTTCAGTGTAAAGG | 3455 |
| hs132684187 | CCTCAAATAATTAGAGCAACAGG | 3456 |
| hs132688357 | TGATATGTCAGGCCAGTAACAGG | 3457 |
| hs132693843 | ATAGTACTGCTCGTGTACTATGG | 3458 |
| hs132694190 | CACTATAAAAGAACAGTTAAGGG | 3459 |
| hs132684186 | CCTGTTGCTCTAATTATTTGAGG | 3460 |
| hs132694361 | CCATGACAGCATGTGAAGATAGG | 3461 |
| hs132683724 | CACTCCCTGTTCACCAAATACGG | 3462 |
| hs132694243 | GCTTTTTCCTTCTTAAAAGATGG | 3463 |
| hs132692086 | TGGCTCTCAAAAGATAGTTTGGG | 3464 |
| hs132687905 | CTCTGGCATGGAGTTCAAATAGG | 3465 |
| hs132688682 | AGAAAAGGAGATTCAAGATATGG | 3466 |
| hs132693350 | GTATCTGCTAAGACAAAATCAGG | 3467 |
| hs132688020 | GATTTCAAGGGGAAAAATTAGGG | 3468 |
| hs132690271 | TCAAGGCAGTTGGTTCGTATTGG | 3469 |
| hs132684666 | ATAAGGAAAGAGGAAATATAAGG | 3470 |
| hs132689671 | TCACTCCATTTTTCTCCAATGGG | 3471 |
| hs132684647 | CAAAGAGGCTAGAGATTGATTGG | 3472 |
| hs132685612 | TATGTTCCCATTTTAAAAGTAGG | 3473 |
| hs132687574 | ATATATCAGTAACTTTAAATGGG | 3474 |
| hs132690206 | ATTTGGCTCCAGCGTTTTAAGGG | 3475 |
| hs132692191 | AAGCAGATAGAATCGTGAAATGG | 3476 |
| hs132691147 | AGTTTGCTCAGAACTATATAAGG | 3477 |
| hs132693791 | TCACAAAGCTATGCATTAGAAGG | 3478 |
| hs132691582 | ACATTTATTTAGAAATGTAATGG | 3479 |
| hs132692584 | CATATTATCGTGATGTAGATAGG | 3480 |
| hs132688883 | CATTGGTCTCTGTATTTACAAGG | 3481 |
| hs132686104 | TACTTCCTCATTTTAGAAAAGGG | 3482 |
| hs132693566 | CTATTACTGTATTGATTAAGTGG | 3483 |
| hs132686968 | ACCTCACTATTCACGGCAACCGG | 3484 |
| hs132689430 | GAAAAAATCTATGGTATAAGAGG | 3485 |
| hs132693094 | ATAATTTTGTAAAATCGAATTGG | 3486 |
| hs132687119 | GTAAGTTTGTCTGCAGGGCTTGG | 3487 |
| hs132690483 | AGAGTATTCTTTATTTTAGCAGG | 3488 |
| hs132685579 | ACTTACACTATCTTACCAATAGG | 3489 |
| hs132688039 | ATCCTCTTAGAAATGACAATTGG | 3490 |
| hs132684015 | TTTTCATGACTTTTCCCATTGGG | 3491 |
| hs132691614 | CTAGCATGCTATACATCATATGG | 3492 |
| hs132690957 | GCCTGTTCCATGTTTGGTGTGGG | 3493 |
| hs132683645 | GTATATTTATCTATTTTTATGGG | 3494 |
| hs132690039 | GGAAGGGAAATTGGAACAACAGG | 3495 |
| hs132692677 | TCTCGTCTTCCTGTTGTCTTCGG | 3496 |
| hs132693013 | GTTTTATCATTGCTTTTTTGTGG | 3497 |
| hs132686557 | ATAAATGAGCTGGCCTGTATAGG | 3498 |
| hs132687436 | TTGGTCCTCTTGGATGTAAAAGG | 3499 |
| hs132686156 | GTTAAGTGAACGCTTTTCATTGG | 3500 |
| hs132684156 | TCTCAACAGCCTAGGATGATTGG | 3501 |
| hs132684682 | TGAGCAGTTAAATATTTAAAGGG | 3502 |
| hs132686357 | TCTCTCTTGTGATGTGATAAGGG | 3503 |
| hs132687599 | CTATAAATATAGAGTAGAAATGG | 3504 |
| hs132689787 | TTACAAAGCTGAGATATCTTAGG | 3505 |
| hs132694020 | ATCCTGTCTGGATGACCTAATGG | 3506 |
| hs132686497 | TCCACTTCATACTTTCAGTTAGG | 3507 |
| hs132693716 | GCACATACGGCATCAAATAATGG | 3508 |
| hs132690493 | CCTGTTGCATAAAAGTAATAAGG | 3509 |
| hs132689654 | TAAACCAGAATTTAAATTGAGGG | 3510 |
| hs132685310 | ACACTTGTAATCCATCCTTAAGG | 3511 |
| hs132690229 | CTTGGAACTATATTTAGTATAGG | 3512 |
| hs132690929 | TCCTAAGTCAGAAGTCTATTGGG | 3513 |
| hs132691504 | GCCTCTCGATATTTTACAACAGG | 3514 |
| hs132683587 | TCAATTGCTTTTTTATTGTAGGG | 3515 |
| hs132689447 | TTTTGCCCTCTGGTACTTTGTGG | 3516 |
| hs132692936 | AATGATATGGTCTTAATAGAAGG | 3517 |
| hs132685460 | TCTTAACCATCACATGCCTTTGG | 3518 |
| hs132687777 | TCTTTTGTCTGTTATTTCCCTGG | 3519 |
| hs132687458 | GCCTAAAGCACTGAGAATTAGGG | 3520 |
| hs132685375 | TCTTGTTTCATAAGAAAAACAGG | 3521 |
| hs132688917 | ATACGTTATTTAGCTCCCTTAGG | 3522 |
| hs132693543 | CTTTTTAACTAACAGACTAATGG | 3523 |
| hs132684144 | AAAGTTCTCTTTTTTTTCCATGG | 3524 |
| hs132690225 | ATAATATGCTGTAATATATGAGG | 3525 |
| hs132687558 | GCTATCCTGCAGATGCTAATGGG | 3526 |
| hs132687532 | ATTTTAGGTTGTTTTTATAAGGG | 3527 |
| hs132690257 | CTACAAACTATTTATTTGCTTGG | 3528 |
| hs132693158 | AATAGATTCCAAGTATGTATTGG | 3529 |
| hs132686893 | ATATCTCAGAATGATTTTAGAGG | 3530 |
| hs132690940 | AGCTTAGCGAACAGTGGCCTGGG | 3531 |
| hs132684979 | TTAAGGGTCAACGAAATCTAAGG | 3532 |
| hs132685930 | GTTTGATTTAGCACTCTTAAGGG | 3533 |
| hs132692924 | TCATTACAGCAGCTACAAAAAGG | 3534 |
| hs132686887 | AATATACTGACAGTATATATTGG | 3535 |
| hs132688674 | GCTGTCTAAATGCCTCAAAATGG | 3536 |
| hs132692055 | CAATACCTACATAAAAATAAGGG | 3537 |
| hs132685671 | GTGTAATTGCTAAATATTGTAGG | 3538 |
| hs132684521 | GTAGGGATTAGTTTTAAATAGGG | 3539 |
| hs132687941 | TATTTTTAAGTATTATTAGTAGG | 3540 |
| hs132692020 | ATTGAAATCCTAGGAAACTTTGG | 3541 |
| hs132690585 | TTTTCCACAGTGATCCATATTGG | 3542 |
| hs132684742 | TCAAACGTGCAAAATATGTTTGG | 3543 |
| hs132692919 | GTGTGTGTACATTCACAATTTGG | 3544 |
| hs132692402 | ACTATATATCCCATTTTAAGAGG | 3545 |
| hs132692891 | AATTCCAGTTTTATCATGATAGG | 3546 |
| hs132690905 | TTTCTCTTCTTAAAAGCTAAAGG | 3547 |
| hs132689691 | AATTAAGTGTCATCATCTAATGG | 3548 |
| hs132687723 | GATTTTCCTTTCATGGACTAAGG | 3549 |
| hs132686978 | GATTAGAAGGGAACGTAATCAGG | 3550 |
| hs132687117 | GCTTGGTCTGATTGATTTGAAGG | 3551 |
| hs132688129 | GACCCACAATTCAAACGTTTGGG | 3552 |
| hs132693552 | TTAACAGTATTAAGATCATAAGG | 3553 |
| hs132684759 | TGTTGCCTGTAGTAACAAATAGG | 3554 |
| hs132684723 | ATTCTAGGTATGTTCCAAAAAGG | 3555 |
| hs132683912 | AGGAATTCACAAACACAGATAGG | 3556 |
| hs132683879 | CTTAGAATAAACGTATCCTTTGG | 3557 |
| hs132691992 | AAAGTCCCCCTAAGTTTTAGAGG | 3558 |
| hs132688490 | GGGCAGCTTTCTGAACTGATTGG | 3559 |
| hs132691858 | AGAAATCTGTGAATAAATAAAGG | 3560 |
| hs132694036 | ATCTCAGGTTCCTCTCCCTTTGG | 3561 |
| hs132686135 | GTTCACTGAGCATAATGTATTGG | 3562 |
| hs132690770 | CAGAATGCCTTAAAAAGAAATGG | 3563 |
| hs132690010 | GGAAATTAGGGGTAAATAGATGG | 3564 |
| hs132683493 | GTGCCATTAATATTACAAAATGG | 3565 |
| hs132693968 | TTAATTTCCTAGGAGGAGTTGGG | 3566 |
| hs132687036 | TCAGATGCGGAAATTTCATTTGG | 3567 |
| hs132688342 | GTGCTCCAAAAATTTTTAGTAGG | 3568 |
| hs132687977 | TTCTCATTAACAAATGTAGATGG | 3569 |
| hs132686338 | GGGGAGGTGAAAAAGATTTACGG | 3570 |
| hs132692317 | TCATAAGCCCCAAATTTTGATGG | 3571 |
| hs132686565 | GCTGAAAGCCTTGGAACTTTCGG | 3572 |
| hs132691650 | TGCTCTTTTGGTGTGATCAAGGG | 3573 |
| hs132693117 | GAGAGAATCTGTTTACATATTGG | 3574 |
| hs132688444 | ACATCCATCAAAAAACTCTTTGG | 3575 |
| hs132691987 | TTACTGACCTCTAAAACTTAGGG | 3576 |
| hs132692177 | TCAAAGAAGGAAGAGTTCATTGG | 3577 |
| hs132693517 | TTTTTCCCATTATTGCTAGAAGG | 3578 |
| hs132685953 | GTATAGTTCTATGTGCTATAAGG | 3579 |
| hs132683971 | TTGACTCCCAGCTCAACTTTGGG | 3580 |
| hs132690461 | TTAAAAGTCAATTTTGAATCCGG | 3581 |
| hs132692665 | AACTTCATCCTAAGGTCAATAGG | 3582 |
| hs132687895 | CTATTTTGAAGCAAAGGTTTAGG | 3583 |
| hs132693395 | TTATGCGTAGGGTTCTGTTTAGG | 3584 |
| hs132691221 | GTACGTATTTAAAAACGATTAGG | 3585 |
| hs132685530 | TATGGTAAAATAAAGTATAAGGG | 3586 |
| hs132687682 | TCATTTTATTCCCTTATTTAGGG | 3587 |
| hs132686547 | TGAATTGAATTTTTGAAGATGGG | 3588 |
| hs132690873 | GCTAGTTTATGTGCTATGTTAGG | 3589 |
| hs132685075 | TGCTCTGTGAAGAAAGAAATTGG | 3590 |
| hs132686269 | ATTGACTATGAATTTATAGATGG | 3591 |
| hs132683659 | TATTTACTCAACTTACACTATGG | 3592 |
| hs132688624 | CTGTCAACTCTCTAGAAGATAGG | 3593 |
| hs132691209 | TTTTTACAGGAAAATACATTAGG | 3594 |
| hs132685604 | CTGTCAACAGATAATTTAGAAGG | 3595 |
| hs132691702 | GCTATGGCACCTTCAGTGATAGG | 3596 |
| hs132689847 | GCAATCCATTTCTATTATATGGG | 3597 |
| hs132685670 | AACCAGCCCCAGAAGTAAACTGG | 3598 |
| hs132692846 | AGCTAGTCTTAAAATCAAAAAGG | 3599 |
| hs132686560 | TGCTGGCTATACACTTTTAAGGG | 3600 |
| hs132686363 | TCATGGTTGCCTATTGACTTAGG | 3601 |
| hs132691784 | TCAAATAGATACCTTTTAAAGGG | 3602 |
| hs132693992 | TTAATATCATTGTATGCAACTGG | 3603 |
| hs132689764 | GCTCCTGCTTGAGCTATTGTTGG | 3604 |
| hs132687274 | GGAAGTCAATTTAAAATAAGAGG | 3605 |
| hs132693956 | TACTTTCCTTAATCTATAAAGGG | 3606 |
| hs132684231 | AGTAGTCATTCTAAAAAGATTGG | 3607 |
| hs132684710 | TGGCTGTTAATATCTCAAAAAGG | 3608 |
| hs132690340 | ACTACGGCAAATTTACAAACTGG | 3609 |
| hs132691527 | TTATAAACTGGCAAGAATATCGG | 3610 |
| hs132688152 | TGTTGGTCCTTCATAATACTTGG | 3611 |
| hs132683489 | GATATTTTGGAGCATTATAAAGG | 3612 |
| hs132684933 | ACATTCAAAGTGATGAGCTTTGG | 3613 |
| hs132687464 | ATTTGCCAGCATTAATAATAGGG | 3614 |
| hs132687150 | AGGGTAGCTGTATAATTAAAAGG | 3615 |
| hs132691579 | ATAGAGAATTATTATATCATTGG | 3616 |
| hs132685247 | GTTCAGAACCACGCACTTGTAGG | 3617 |
| hs132690294 | AGAGTTAAAAGAATTTATAATGG | 3618 |
| hs132686745 | TGATTTCTACCACAGCCTTTTGG | 3619 |
| hs132693361 | GCTGTAATGTTGACAATATCTGG | 3620 |
| hs132685960 | CTTTAAGGAAAGTTTTTAAAGGG | 3621 |
| hs132686695 | TATCTTGCTTTGCTATAAACAGG | 3622 |
| hs132689432 | GTAGGTTTAGAAAAAATCTATGG | 3623 |
| hs132693884 | TTCACTGTATGTGAACAAATAGG | 3624 |
| hs132689038 | TTAATTTATGAGCCTTTGTCTGG | 3625 |
| hs132689956 | TATAATATGCCAATGTCTATAGG | 3626 |
| hs132691889 | AAGTCTGATGATTTGCTTAAGGG | 3627 |
| hs132686323 | CGGCTGTTATTCAGTTATAATGG | 3628 |
| hs132686574 | TACCATACGCTAATCAACTATGG | 3629 |
| hs132690419 | TTAAAGCTGCTGAAGTTTGTTGG | 3630 |
| hs132690187 | TGTTTAGGCTGCCATTTTAAGGG | 3631 |
| hs132688062 | TTTTCCCTCCCAAATCATAAAGG | 3632 |
| hs132684226 | AGGTTTCACTGAACCATTAGAGG | 3633 |
| hs132694127 | ATATTCTTACCCTTGGAATCAGG | 3634 |
| hs132693885 | TGCTTCACTTACTCCTTAAGAGG | 3635 |
| hs132685751 | GTATATATACGTGGCTTATGAGG | 3636 |
| hs132693549 | GGTAACTGAGGTGTTCAATATGG | 3637 |
| hs132689149 | TTTTCCTGACCAGAAATAACAGG | 3638 |
| hs132691521 | ATGGCTAGTTTCTCATTAAAGGG | 3639 |
| hs132687719 | AAGCAAATTTTAGAAATAAGAGG | 3640 |
| hs132690401 | TATGTAACTGTTACTAAATACGG | 3641 |
| hs132684470 | GATTTTCAGCACCTGCTATTGGG | 3642 |
| hs132683600 | CCATAACTCCAATTTGCTAATGG | 3643 |
| hs132686384 | AGAACCGTGCCCAATACTTATGG | 3644 |
| hs132692068 | GTAGCTATAAGTGATTTAACAGG | 3645 |
| hs132690586 | ATATGGATCACTGTGGAAAAAGG | 3646 |
| hs132688828 | CTTTATCGTTTAGTTATTAAGGG | 3647 |
| hs132683925 | GGAGCATAGCTATTCCTAAATGG | 3648 |
| hs132691457 | GATTTGGGGTTGAATGGGGGGGG | 3649 |
| hs132689824 | CCAGGATTACTTGCCTTTGTAGG | 3650 |
| hs132684560 | ACAGTTCCCAAGGATTTGTTTGG | 3651 |
| hs132689295 | ATTCCAGAACAAATTCAATATGG | 3652 |
| hs132685847 | TTTCTGTTCCTTCCCACAATAGG | 3653 |
| hs132692345 | GACATGGGCAACAAATTAGATGG | 3654 |
| hs132689288 | TGTGCCTTATATTTCAAAATCGG | 3655 |
| hs132690542 | CACAATGCAGAAATCATTATAGG | 3656 |
| hs132684748 | CCATCACTTTCACAAAACTATGG | 3657 |
| hs132689353 | TATATGGGAAAGGTTACATTAGG | 3658 |
| hs132689679 | CCTGCAATTGGAAAGATACTTGG | 3659 |
| hs132685627 | GAGTAATTAAAAGTGCTTTAGGG | 3660 |
| hs132686598 | GACACAGTCTGAATAGTAATTGG | 3661 |
| hs132685119 | TTTATATCCACTATTGTGATTGG | 3662 |
| hs132693270 | GCCTTTGGAGAGGATGCATTCGG | 3663 |
| hs132693628 | CACAGTTTACTTTATGCAAATGG | 3664 |
| hs132691780 | CTATGTTACTGAAAAGTAACTGG | 3665 |
| hs132688950 | TTAGCTCTTCCAACAATAACAGG | 3666 |
| hs132690470 | CCAAAGTTATTTTTTCCCCTTGG | 3667 |
| hs132688410 | GCAATAGTCCGTAAACTTCCGGG | 3668 |
| hs132690685 | ATATGCTCCCTCATTCTTCTGGG | 3669 |
| hs132693294 | TTCTTCTCACTGAATATTAAGGG | 3670 |
| hs132684597 | AGTATTTAGAGCAAAAAAAAAGG | 3671 |
| hs132690563 | TCCTTGTGTTATTAAATAGATGG | 3672 |
| hs132688055 | ATTACTTTCATTAAAAGAATAGG | 3673 |
| hs132693762 | ATGGCACTATTGCCTCAAAATGG | 3674 |
| hs132685216 | TATGCTTTGTTTTTTCTCAATGG | 3675 |
| hs132689338 | GCAGTAGCTCAGAATGAGATAGG | 3676 |
| hs132689322 | GCACAGTAATTATTCATTATGGG | 3677 |
| hs132686984 | TCTGAGTCTGAAGCAGAAACTGG | 3678 |
| hs132693358 | GGCTTATGATGTTAATTTAGTGG | 3679 |
| hs132693346 | GTTCTTTCAGAACATAATAATGG | 3680 |
| hs132688143 | GAGAAGCTAAAGAGTAAATCAGG | 3681 |
| hs132683350 | GATAAATCTTAGCTACAATATGG | 3682 |
| hs132688664 | TTAGCACCTATGTCAGTAATTGG | 3683 |
| hs132688093 | AGTATTCTCAGAGATGAAAAAGG | 3684 |
| hs132688528 | CCTCTTTTCAGTTCAAAGAATGG | 3685 |
| hs132694023 | ACAGAGTCTATTTCTCCATTAGG | 3686 |
| hs132688429 | TTAGAGTCAGTGAGTTTATTAGG | 3687 |
| hs132688654 | ATATGGATTGTCTAAGTCATTGG | 3688 |
| hs132689959 | AAACAACCCAAAATTTTAATGGG | 3689 |
| hs132689682 | TTTCTAATAGAAGTATAAAAAGG | 3690 |
| hs132690138 | GAGAATGTAGATGGCTTAATGGG | 3691 |
| hs132683832 | ATACCACGCTTTGAAAATACTGG | 3692 |
| hs132687734 | ATAAAAGGAAACTTTTTAGATGG | 3693 |
| hs132691298 | TAGTTATGTAAATTATTTTAGGG | 3694 |
| hs132693656 | AGCCACACTGAAAGAATATATGG | 3695 |
| hs132690832 | ATATTTAGCTATAGTCGTTTAGG | 3696 |
| hs132692243 | GCATTTACCATGCAAGAAAAAGG | 3697 |
| hs132687510 | CCTTTGCCGATCAGCTTTAAGGG | 3698 |
| hs132690367 | TCCACAACTACTAAAAAAAAAGG | 3699 |
| hs132692334 | GGATCCTTGTTATAAACGTTTGG | 3700 |
| hs132691914 | TTGTTTTTAGAATTATTATCTGG | 3701 |
| hs132692633 | ATAGAAGCTGAACTCTAAACTGG | 3702 |
| hs132686317 | GGATGAACTTCATTATAATCTGG | 3703 |
| hs132683931 | AGATGACATGTCTAACAAAATGG | 3704 |
| hs132688867 | ATGCAGGGTGGTCAGGTAAAAGG | 3705 |
| hs132689225 | CTTGTGGTGCTGCTGAGATTTGG | 3706 |
| hs132691857 | ACTTTGCTGTTGTCCCCATCTGG | 3707 |
| hs132688914 | TTAGGGATATGATTACTCTTGGG | 3708 |
| hs132691271 | GCTCCCAAGCTACCTTTAACTGG | 3709 |
| hs132688537 | TTATTTGATAGACTAGTAAAAGG | 3710 |
| hs132683304 | TTTACTCCGAAAAACTATTTCGG | 3711 |
| hs132687931 | TTAATTATCACACACTATAAAGG | 3712 |
| hs132694409 | TCAGGAGTCTAGGTTTCTTCAGG | 3713 |
| hs132693062 | GCCAGGCATTGTCTGATTTAGGG | 3714 |
| hs132686069 | ATGTATTTCTTTGTTAAAGATGG | 3715 |
| hs132686077 | TGATATTAACATGAAAAAATTGG | 3716 |
| hs132685194 | CCCACATTGCTGGTACCGTTGGG | 3717 |
| hs132692800 | CTCTAGGCTAAACATATAAAAGG | 3718 |
| hs132689536 | CATAGGAGCCTTTGGCTAAAGGG | 3719 |
| hs132691344 | TCAATTCCTTGCATTTTTGCAGG | 3720 |
| hs132686914 | AGTGATTTGCATTATCCTATAGG | 3721 |
| hs132686759 | AAGAGAAGTGGAAGGTTTAGAGG | 3722 |
| hs132689861 | GATAGATTAAGGAAAGAAAAAGG | 3723 |
| hs132691186 | CTACCCGAAATATCATTCTTAGG | 3724 |
| hs132691516 | AATTTATTCATGTATAAAACTGG | 3725 |
| hs132693834 | CGGTGTGAAATAGACAAAAATGG | 3726 |
| hs132690610 | GCCATGGGCTTCATTGTCTATGG | 3727 |
| hs132684230 | TTGACTGCCCAAACCTCTAATGG | 3728 |
| hs132685294 | GCACAGAATCATTTTTATATAGG | 3729 |
| hs132692729 | GGTAGATGTATTTTTAAGCTAGG | 3730 |
| hs132685868 | GCCAACATGCAATAAAAGTTTGG | 3731 |
| hs132686992 | ACACAGGTGCGCAACTTTATAGG | 3732 |
| hs132693215 | CTTGGAATGCAATCTTTCTTGGG | 3733 |
| hs132690003 | TTTCTACTAAGGCAACATTTTGG | 3734 |
| hs132685633 | AGAGCGATAGAGGGAGATAAAGG | 3735 |
| hs132687406 | CCTATTTCTATAAACTTTAAGGG | 3736 |
| hs132692922 | TATGTTATTGAAATCATTTAGGG | 3737 |
| hs132691686 | TTCATCACCGTGATTACTAATGG | 3738 |
| hs132688571 | ACAATGTAGTGAAAATAAATTGG | 3739 |
| hs132684374 | CACACACCTTTTCAAATAAGAGG | 3740 |
| hs132691693 | TGTCCTTCAGATTTAGTTAGTGG | 3741 |
| hs132685452 | TTCTATTTAGTGCCATTTAGAGG | 3742 |
| hs132689822 | ACTGTCCTCAAGAGGAAATTAGG | 3743 |
| hs132691470 | CATTAAGCTAAGCAAATAAATGG | 3744 |
| hs132690107 | TCTCTTCCTTTATCAGATTACGG | 3745 |
| hs132693760 | CATTTGTGCTGTCAAATTAAGGG | 3746 |
| hs132691317 | CTAGATAAAATTCAATTGATAGG | 3747 |
| hs132685147 | ATTTTCTTTGGTTATATAAAGGG | 3748 |
| hs132687352 | AGTCCCAGTTATAAATTAATGGG | 3749 |
| hs132685495 | GTATACCAATTGTTCAGTTTTGG | 3750 |
| hs132685806 | TTTTATTTACTGCAGCTAAAAGG | 3751 |
| hs132683480 | ACATTTTCTGTGTCACATTAGGG | 3752 |
| hs132692490 | GCTCTCTTCAAATTTGGTATAGG | 3753 |
| hs132687270 | GCACTGTAAGGTACTTTATTGGG | 3754 |
| hs132684962 | TGTCCCCAGGAATTCTATAATGG | 3755 |
| hs132685027 | TTAAAACTCAAATTATTTGTAGG | 3756 |
| hs132690649 | CAGGGCAGAGAATTGCAAAATGG | 3757 |
| hs132685516 | CATCTTGTATGTAATTTTAAGGG | 3758 |
| hs132691524 | GGAAAATATTTCATTTTTAACGG | 3759 |
| hs132688451 | GCCACCAAAGAGTTTTTTGATGG | 3760 |
| hs132684236 | GTTTCTTTCACTGTGGTAACTGG | 3761 |
| hs132686490 | GCAGATTTAGCCAAATTAACAGG | 3762 |
| hs132687081 | TTTACAGAAACTCATATATAGGG | 3763 |
| hs132686120 | TTACTGTCTTAGAAAAGTTTAGG | 3764 |
| hs132687697 | AATACCAGATGCCACATAAAAGG | 3765 |
| hs132690636 | TCAGAGGGCAAGGGAAAAAAAGG | 3766 |
| hs132688887 | AGATGAACAATCCAGATATAGGG | 3767 |
| hs132687600 | TATAGAGTAGAAATGGAAATTGG | 3768 |
| hs132685044 | CTCAGTACTTAACATTTTAAGGG | 3769 |
| hs132692736 | AGGCATTACATGGGGATAAATGG | 3770 |
| hs132694224 | TCTCTGCTCACAACATTAACTGG | 3771 |
| hs132690462 | TGTTGTTGAGAGGATAAAAAAGG | 3772 |
| hs132687007 | ACAAATTTGAGTAAGTTATACGG | 3773 |
| hs132693787 | GCATTAAGTATCCAGCAAATTGG | 3774 |
| hs132688470 | GTTTACTACTTATTTGGTTCCGG | 3775 |
| hs132686360 | CCACTTTTCCCTAAGTCAATAGG | 3776 |
| hs132689680 | CCAAGTATCTTTCCAATTGCAGG | 3777 |
| hs132689576 | CCTTAACTTACTTAAACAATTGG | 3778 |
| hs132691377 | AGAGGTAGCTTTTCTGTCATTGG | 3779 |
| hs132693448 | CCAGGTTTTGTCAGGCACTATGG | 3780 |
| hs132689986 | TTACCATTTTTGCAGATATTGGG | 3781 |
| hs132685229 | TGTATTGTCAATCTTCCTTCTGG | 3782 |
| hs132691786 | GTAATGACTATCCCTTTAAAAGG | 3783 |
| hs132693639 | GATTTTATAAATGAGTAATATGG | 3784 |
| hs132686709 | TTATTAACCAACATAAAATATGG | 3785 |
| hs132690703 | CATACACTCTCAAAGAGATTTGG | 3786 |
| hs132692304 | TTAATTTGTAATTAGTCTATAGG | 3787 |
| hs132694041 | GTTCTATGACAAGTGTAAAAAGG | 3788 |
| hs132684210 | TGTACTTTAATGATTCTAATAGG | 3789 |
| hs132692444 | TTATGACTCCTGGACATTTTGGG | 3790 |
| hs132694247 | TATGAGAATGGGAGGATAATAGG | 3791 |
| hs132684150 | AGGTGGGCTGCCAGGTAAATTGG | 3792 |
| hs132688440 | TGGAAGTGTGAATAAAAGTTAGG | 3793 |
| hs132684670 | TCAAGTCTACCCATTCTTCTAGG | 3794 |
| hs132693447 | TATAATCTCGACGTACAATTTGG | 3795 |
| hs132692455 | AACACATTCTGCTATATCTATGG | 3796 |
| hs132691598 | AATGTGATATTTTATCAAATTGG | 3797 |
| hs132685440 | TTTAATGGCGTAAGTAAAACTGG | 3798 |
| hs132683633 | ATTCTGTCATAATTAGTCTATGG | 3799 |
| hs132688110 | CCATGGCAGGAAGATTTATTGGG | 3800 |
| hs132685317 | TTGTACTTAATAATAGTCTTAGG | 3801 |
| hs132689003 | ATAGAAACTCAGCTGAAATAAGG | 3802 |
| hs132685129 | TTTGTATCACTTAAAACATTAGG | 3803 |
| hs132693692 | GTATTAGATGTAACAAAAATTGG | 3804 |
| hs132691791 | AATCCCATTTCACTTTTGATAGG | 3805 |
| hs132689744 | GGATTGAGCTCATTTATAAAAGG | 3806 |
| hs132689425 | TTTCTGCATATATAGAAAATTGG | 3807 |
| hs132685563 | CCACTGTTCTCTATAAAATATGG | 3808 |
| hs132693462 | TTATATTGATGAACAGGTTTTGG | 3809 |
| hs132685756 | TTATATATATACATTTCTTTAGG | 3810 |
| hs132688228 | GTAGATGAATGTGATTTAAATGG | 3811 |
| hs132686157 | AGAAATCCAGTAATATTAATTGG | 3812 |
| hs132687499 | TAGTTGTCAACCTTCAAAATAGG | 3813 |
| hs132683510 | TTATTAAGAACAACTTTTGTAGG | 3814 |
| hs132687481 | GCTGAAGAATGGCAATAAAAAGG | 3815 |
| hs132693531 | TATATGGGAATCTAAATAAAAGG | 3816 |
| hs132689172 | GCTGTTATCGATTCGGTTTAGGG | 3817 |
| hs132692743 | TGTGTATTAAATGTTAAAATTGG | 3818 |
| hs132693567 | GTATCTATCTTAGGTATATATGG | 3819 |
| hs132685268 | TTAGTGAGATGAACTGTTAATGG | 3820 |
| hs132690091 | TCTTAAGCACCAACATAAAAAGG | 3821 |
| hs132684022 | ACAGTTACCCTTACTTTAGATGG | 3822 |
| hs132693438 | CCTTTCATCCCATTTGGTTATGG | 3823 |
| hs132689030 | ATTCCTTCTTTTATAACAATTGG | 3824 |
| hs132687580 | ACAATAGATGAACAAGAAAATGG | 3825 |
| hs132683728 | TCAAGCCAAAAATTATAAATAGG | 3826 |
| hs132685026 | TTATTAATGTATATGTATATAGG | 3827 |
| hs132693136 | AGACAGAGAGTAGCTCCTTTTGG | 3828 |
| hs132685209 | AGAACTTTAGGCAGAATTAAAGG | 3829 |
| hs132689915 | CTTAATTCAGAAATATATTTCGG | 3830 |
| hs132693391 | TTATCAATGCCATTAGTTACTGG | 3831 |
| hs132693636 | GATGCTGCCATATATGTAATTGG | 3832 |
| hs132684318 | ACAAAAGGATAGTTAGTAAAAGG | 3833 |
| hs132688040 | TTACTCATGTACAGAGTAAAAGG | 3834 |
| hs132691885 | GCTAAAGAACAATATATAAATGG | 3835 |
| hs132690590 | TTATAAGGCATATATTTCTTAGG | 3836 |
| hs132688561 | GATATTGCTGAGAAAAGTTTTGG | 3837 |
| hs132688554 | CCTTGAATTTATGCACTAAATGG | 3838 |
| hs132691906 | TTTGGCCTGTATATACATATTGG | 3839 |
| hs132691995 | GCCAAGTCTACAGTTCTTTAGGG | 3840 |
| hs132687892 | CTCTGTTGTGGTTTGCTTCAGGG | 3841 |
| hs132688241 | TGGCTCTTATAATAGGTTATTGG | 3842 |
| hs132685491 | CTAAATTTTCTGGCCAAATAGGG | 3843 |
| hs132685477 | CCAGTTTTCAAAAACATTGATGG | 3844 |
| hs132685890 | AGGTAAGTAAGACAGATTTTAGG | 3845 |
| hs132689835 | CTTCTAGCGCTTGTCATATAGGG | 3846 |
| hs132685993 | ATATGCTGTATTATATTTACAGG | 3847 |
| hs132683936 | GCATTGTGCATTTAAACTTTTGG | 3848 |
| hs132690779 | TGAGAGTCAGAGCCTGTTAATGG | 3849 |
| hs132683445 | ATAAAAATAACTTTATTAGAAGG | 3850 |
| hs132686884 | TGTCCAAGTCAGAAACTCTTTGG | 3851 |
| hs132690463 | TTTCACTCTACCAAATAAAAAGG | 3852 |
| hs132687095 | GCCAAGTGTCTTCCGCTAAAAGG | 3853 |
| hs132685168 | TCATATTAGCATTCACTTAGAGG | 3854 |
| hs132691015 | GGCTGTCCTTGCTAATTAATGGG | 3855 |
| hs132692286 | GATAATTCAGTGATTGTATACGG | 3856 |
| hs132686898 | TTAGACAAGCACAACTTATTAGG | 3857 |
| hs132688095 | ATACTCAGATGGACAAGTTTTGG | 3858 |
| hs132690677 | TATTTATCACACATGCAAAAAGG | 3859 |
| hs132690996 | CTATGGGCTTCCTTTCTAAAAGG | 3860 |
| hs132685710 | TTATACTGACGTTTATTATCAGG | 3861 |
| hs132689194 | GATTGTACCTTTAGACTTATGGG | 3862 |
| hs132690186 | ATAGAAATTATCCCTTAAAATGG | 3863 |
| hs132693901 | TCTTTCTCTTTCTTGTTCATTGG | 3864 |
| hs132689375 | AGATGTATACTTAAGATATATGG | 3865 |
| hs132685640 | TATGTATTTTTTTATTTAAAGGG | 3866 |
| hs132689733 | TGGACTCTGAAAACAAAAATAGG | 3867 |
| hs132694370 | GCATGAGCATGGACAGTATTTGG | 3868 |
| hs132687961 | CGTTTGGAATGACCATAAAATGG | 3869 |
| hs132686711 | ATATGTACTACGTTTTTTACTGG | 3870 |
| hs132689909 | AATCTCATACACTAGAAAAATGG | 3871 |
| hs132684722 | CCTCCTGTAACGTCAATTCTAGG | 3872 |
| hs132694092 | TAGCATGCTTAAAGCTTTAGAGG | 3873 |
| hs132686160 | ACTTAATGTACAGATTTTATAGG | 3874 |
| hs132692902 | TGTTATATAAAACCAAATAATGG | 3875 |
| hs132690895 | CTACTTTTCATGACTCTATCTGG | 3876 |
| hs132685277 | TTGAGAAACACAACTCTAAAAGG | 3877 |
| hs132690111 | CATGGAATCAGGACTATAAAAGG | 3878 |
| hs132690969 | GTAGGAATACTGGCCTTTACTGG | 3879 |
| hs132694206 | GGTAAATTCAGCAAGATTAATGG | 3880 |
| hs132693318 | CTTCTATGCTTCATTTTTGATGG | 3881 |
| hs132689673 | AAATTCCCATTGGAGAAAAATGG | 3882 |
| hs132686330 | TCTGGCCTGTGGGCCATAATTGG | 3883 |
| hs132691061 | TCCCCACTAGCCTCACCATTTGG | 3884 |
| hs132689408 | GTCCTTTTCTAAAAAAAATAAGG | 3885 |
| hs132692133 | CTAATTTTATGGTCAATAATTGG | 3886 |
| hs132690775 | ATTTTGAACCAAATTATAAATGG | 3887 |
| hs132693419 | TTTATACACAGGAATAAAAAAGG | 3888 |
| hs132686891 | GTTAAACACTTATTATTAAATGG | 3889 |
| hs132692643 | TGAATGGCTTTCCAGCCTTCTGG | 3890 |
| hs132689579 | CTTTCTGTCCAATTTATAAAAGG | 3891 |
| hs132686458 | TTTAAACTTACCCCTCAAAATGG | 3892 |
| hs132691351 | AATTTATTGGATTTAATATTGGG | 3893 |
| hs132685837 | TGTGCTTTACTATTTTCTTTAGG | 3894 |
| hs132687546 | AGTAGTGTTGTGTAAGTAAATGG | 3895 |
| hs132693049 | CTTTATCGAACCTTGTTAATTGG | 3896 |
| hs132684297 | TTGCATCTCCTTTTTCAGTATGG | 3897 |
| hs132691737 | CATCATTTACCAATATTTTAGGG | 3898 |
| hs132683388 | TTGTGACTCTGATTATCTTATGG | 3899 |
| hs132687480 | CCATTCTTCAGCATTTTTACTGG | 3900 |
| hs132691161 | TTAATATCTAACCTGTTTACAGG | 3901 |
| hs132686169 | TGAGTTATCGTTCTGTTCTTAGG | 3902 |
| hs132690550 | TCTGTGACAGTTATTAAAAATGG | 3903 |
| hs132692493 | CCAGTTACAGGCCCTTTTATGGG | 3904 |
| hs132688925 | GAGATGATCGATCTATGTTTTGG | 3905 |
| hs132687688 | TCAGCCCTCTACCCTAAATAAGG | 3906 |
| hs132689062 | GAGATCTCTCAGAAAAAAATTGG | 3907 |
| hs132693626 | GCAATAATTTAGATTGAAAAAGG | 3908 |
| hs132691735 | TTAAAGATTCCCTAAAATATTGG | 3909 |
| hs132685089 | TATTGCGGCAACTTTCTAAAAGG | 3910 |
| hs132687604 | TCACACAAGTAAAATTTTATAGG | 3911 |
| hs132684028 | CCAGACCCTCCTCTTCTAAAAGG | 3912 |
| hs132687360 | CATATAGGAGACGTAATATATGG | 3913 |
| hs132689960 | ATAAAACCCATTAAAATTTTGGG | 3914 |
| hs132692689 | ATAAAGATGTAAGTAGAATATGG | 3915 |
| hs132691688 | CCTTGGACTTGCTTCTAATATGG | 3916 |
| hs132683929 | TATAAAACAAACATATTAAAAGG | 3917 |
| hs132692592 | ATATCAATATAAAAGTTAATTGG | 3918 |
| hs132687890 | CCACAATCAGGACAGTAATTTGG | 3919 |
| hs132687177 | TCTTAAGAGCACATACTTATAGG | 3920 |
| hs132693991 | GCATGACCATGCAAACTTTCAGG | 3921 |
| hs132690137 | GTAGATGGCTTAATGGGTTTTGG | 3922 |
| hs132686326 | TTCAGTCTCTTGAGATTTACAGG | 3923 |
| hs132683595 | TTTATGCTCCATTAGCAAATTGG | 3924 |
| hs132689039 | CACACAAGTGAAAATTAAATTGG | 3925 |
| hs132689483 | CTTTGAGAGCAAACAAAAATTGG | 3926 |
| hs132689386 | ACATAGAGCTTCATACTTACTGG | 3927 |
| hs132692998 | GCAACTGCTACCACAGTTAAAGG | 3928 |
| hs132683292 | GTATTACATTCATTGATAAATGG | 3929 |
| hs132694001 | AAGTGTCACTTGAAATAAAAAGG | 3930 |
| hs132693245 | CTTTTTTTCCTTTCTGTAAAGGG | 3931 |
| hs132693741 | GCAAAAATCTGTATGCATTAAGG | 3932 |
| hs132689855 | GAAAACCAAGAGCTTATTAAAGG | 3933 |
| hs132683518 | TTTTCAGGCTCTTCATAAATAGG | 3934 |
| hs132690295 | TCTAATCTGCATTAAATAAAAGG | 3935 |
| hs132691486 | TACATACTGCAAATAATAATTGG | 3936 |
| hs132691267 | TCTTCCTTGAGTCCAGTTAAAGG | 3937 |
| hs132691189 | GGAAAAAGCTGGGAGTTAATTGG | 3938 |
| hs132686288 | TGTTCTACGTATTTCAAAAATGG | 3939 |
| hs132686710 | TGGTGTCAAGATATTAAAATTGG | 3940 |
| hs132683752 | TTATGCCACTGGATTAAAAAAGG | 3941 |
| hs132689940 | GATTTAGTATTGTAAAAAAATGG | 3942 |
| hs132684699 | TTTGAATGCAAAACACTTAGAGG | 3943 |
| hs132694215 | TCTCTAGTACTTAAGTAGTATGG | 3944 |
| hs132687841 | CTCCCTGCCATAGTTTTAAATGG | 3945 |
| hs132683334 | AATCCCTTAGTATAAATCTTTGG | 3946 |
| hs132687922 | TTTGGTGACACAAGTAAAAATGG | 3947 |
| hs132690875 | GTATTTTGCAACAGTATAATAGG | 3948 |
| hs132687535 | GTTTGGGCTTTTGTGTTAATTGG | 3949 |
| hs132688217 | CTAGGGCTAGGGCAATTAATTGG | 3950 |
| hs132689221 | GCTCGGCTATTTTTAGGTTTGGG | 3951 |
| hs132683945 | GTATTTATATTTGTCTTCTATGG | 3952 |
| hs132686003 | GCAGAGAACAACAATTTTAATGG | 3953 |
| hs132688446 | TGATGGATGTTCTTGTTTATTGG | 3954 |
| hs132683896 | TGTCATTTCTAGTACTTAATTGG | 3955 |
| hs132687957 | GTTACAGCAATGGGTCTTAATGG | 3956 |
| hs132685862 | TGGAATTCATGTATTATAAAAGG | 3957 |
| hs132687833 | ATTACCATTTCAACTCTAAATGG | 3958 |
| hs132691020 | GCAAAACGAGTGCCAATATTTGG | 3959 |
| hs132688657 | ATTGACTTCAATCTTTAATATGG | 3960 |
| hs132689333 | ACAAGGAGAACCAAATTATTTGG | 3961 |
| hs132686472 | GCACTAGAGGTTACTATAAATGG | 3962 |
| hs132684335 | TCACATTCCCTTGTAAAAAAAGG | 3963 |
| hs132689060 | AGTCAGTGCTCCTTATTTAAAGG | 3964 |
| hs132692384 | TCACAATCCCACTTTTTCTTTGG | 3965 |
| hs132688317 | TCATAAGCTAATTATTAAATTGG | 3966 |
| hs132687770 | TCATTTCAATCCACAAAAATAGG | 3967 |
| hs132687618 | ATATACACACAAGAAATTTTAGG | 3968 |
| hs132694140 | GATTGCTTCTTGCCTGAAATTGG | 3969 |
| hs132686423 | GCAGTACTCAACAAAGTAATTGG | 3970 |
| hs132691016 | AGGCTGTCCTTGCTAATTAATGG | 3971 |
| hs132685525 | GGTTATGTATATTATAAATTAGG | 3972 |
| hs132694135 | GCCGTCCTCTTACCAATTTCAGG | 3973 |
| hs132689712 | TGGCATACGGAGATCAAAATTGG | 3974 |
| hs132685552 | ATAACTTGTTTGGTGAAAAATGG | 3975 |
| hs132683911 | TTTCAATTCATGCCAATTATAGG | 3976 |
| hs132684732 | CTAACTCCAGTTTATCATTTAGG | 3977 |
| hs132693548 | TATCTGACTCTAAATAAATTTGG | 3978 |
| hs132694210 | GCAGAGACTTCAATTTTTTATGG | 3979 |
| hs132678323 | AATCAAAGATAACACCACAGGGG | 3980 |
| hs132681663 | AAGATGGTAGATGAATGCAATGG | 3981 |
| hs132678127 | GTATGAAGCAGAAACCACGAAGG | 3982 |
| hs132678114 | TATAGTATGTCCTACCACGGGGG | 3983 |
| hs132679020 | ATAGAGATCAGAAAGCCCAGTGG | 3984 |
| hs132681312 | AGGGTACTAGTGTAAGACAGGGG | 3985 |
| hs132678960 | AAGTGGAGAAAAGTTCAGAGGGG | 3986 |
| hs132678913 | TCAAAGATTCAACAACACTGTGG | 3987 |
| hs132678666 | GGGGCATCAGAAACACACAATGG | 3988 |
| hs132680468 | GAAGTTAAGAGCAAGCACTGAGG | 3989 |
| hs132681298 | GTAACATGTACCCAACAATGTGG | 3990 |
| hs132679252 | ACACTGAGAGTGGAACACAAAGG | 3991 |
| hs132677332 | ATATGCTTTGGAAAACACGGGGG | 3992 |
| hs132677361 | AGGCATGGGAAGTAACACGTAGG | 3993 |
| hs132677715 | TTCACTGTGTGTGATCCATGGGG | 3994 |
| hs132680854 | ATCTCCCTAAGCATACAGGGTGG | 3995 |
| hs132677251 | GGTGAATGCAGATGGTACAGAGG | 3996 |
| hs132678890 | GGTTAGCCCTCAAGGCAACGTGG | 3997 |
| hs132680274 | TGAATGGGAAACCATCAGAGAGG | 3998 |
| hs132683130 | TTTGTCATAGAGTATACACGAGG | 3999 |
| hs132678407 | ATGACAAAGTAAAATCACAGTGG | 4000 |
| hs132678466 | TGTACGGTCAAGAAACATGGTGG | 4001 |
| hs132682292 | TAGATATTACTCACTCAGGGAGG | 4002 |
| hs132680863 | ATTGGAGACTGTATTCACCACGG | 4003 |
| hs132678656 | AAGGGGTTGAGGGAAAGCCGAGG | 4004 |
| hs132680236 | GTAAAGGGGATAATACCCTGAGG | 4005 |
| hs132681045 | TATCATGAGAAAGACATGTGCGG | 4006 |
| hs132682883 | CACCCTTAAGTGAAGCACAGAGG | 4007 |
| hs132680658 | ACAGTGGTTTCCCTGCATGGAGG | 4008 |
| hs132678813 | GCAAACCCACTCCTACACGAAGG | 4009 |
| hs132678115 | ATATAGTATGTCCTACCACGGGG | 4010 |
| hs132680603 | GGAGAAGTGAAGAAACATGGAGG | 4011 |
| hs132681500 | ACTGAACAAAGCACTCCCGTAGG | 4012 |
| hs132682302 | TGAAATGTCTCCATTCAATGTGG | 4013 |
| hs132680837 | TGGTATTGCTAGTAGAACGGTGG | 4014 |
| hs132683067 | GATATGGGAGTTAAGATTCGGGG | 4015 |
| hs132681619 | TTTGACTGAATAGAAAGTGGTGG | 4016 |
| hs132682991 | CCTATGAGAAGCAGGCAGGGGGG | 4017 |
| hs132678425 | ACCACAACAGAGAAGGTTGGGGG | 4018 |
| hs132677450 | TCTTCTGTCAAAAGTCACAGAGG | 4019 |
| hs132679437 | ATGATGGTGAAACTGGCGGTGGG | 4020 |
| hs132678318 | TTAGAGATATTGTACCCCTGTGG | 4021 |
| hs132679242 | CATGTACATACAGTTCTACGAGG | 4022 |
| hs132677785 | TGCCTGTGTGTATGTGAACGAGG | 4023 |
| hs132678795 | AAGATAGCCTCGCAGCACAGTGG | 4024 |
| hs132679435 | ATGAATGATGGTGAAACTGGCGG | 4025 |
| hs132680592 | AAGGAAATATAAGCCCAACACGG | 4026 |
| hs132679395 | GAATTGCACACACACACACGCGG | 4027 |
| hs132681954 | GGACGCGTCAGTAAAACTGGTGG | 4028 |
| hs132681060 | TCTCTGTTATGAGTCCACAAAGG | 4029 |
| hs132679468 | GGGGCCACTTTTAAACTAGGGGG | 4030 |
| hs132682912 | AATTTATTGAACCCTCAAAGGGG | 4031 |
| hs132678361 | ATAAAACATTCAATCCCACATGG | 4032 |
| hs132679539 | CTGCAACATCAAAAACAGAGAGG | 4033 |
| hs132677945 | TCCCTTGTCCAAGAGCCCTGTGG | 4034 |
| hs132683271 | GAACTTGGTAAAGACCAAGAGGG | 4035 |
| hs132677949 | AATTCTAAATGATAACCACAGGG | 4036 |
| hs132680544 | AAAAGATGATGGAATCCCTGAGG | 4037 |
| hs132679924 | AGATACACTCGGAATTAGTGGGG | 4038 |
| hs132679119 | ATGTAACTAAGCATTTAGAGGGG | 4039 |
| hs132680979 | ATAAAGATACTAAGCCCTCGGGG | 4040 |
| hs132682746 | GTGGTGATAGTTCTAAAACAGGG | 4041 |
| hs132677368 | ATCACTATTAAAGAAGACGACGG | 4042 |
| hs132682471 | ATTAGGTATAATTATCACTGTGG | 4043 |
| hs132682690 | TCTTACATAATGTTCAAACAGGG | 4044 |
| hs132678754 | GTGATAGCCTTTGGTCAACGGGG | 4045 |
| hs132679680 | TGTATGCGTATGTCCAACAGAGG | 4046 |
| hs132679185 | AAGTGGGGTCAAGAGCCTGTGGG | 4047 |
| hs132679448 | ATACATAAAACGGAAAACTGAGG | 4048 |
| hs132677784 | CTGTGTGTATGTGAACGAGGAGG | 4049 |
| hs132678886 | TGCCTCCTATTATACCCTAGGGG | 4050 |
| hs132682364 | ATAGTGGTGTCAGATGAGAAGGG | 4051 |
| hs132682261 | ATAGCAGCCAGACAAAACAGAGG | 4052 |
| hs132680282 | TCTATCTCTTTAGGACCAGGGGG | 4053 |
| hs132680102 | TGTATTCTGTAATTGCTAGGGGG | 4054 |
| hs132682513 | CTCATGTACCTGGAAATGAGTGG | 4055 |
| hs132683156 | GTAGAAACAGAAGAAAAACTGGG | 4056 |
| hs132678090 | ATAGGCTGAAAGCTCCAACAGGG | 4057 |
| hs132680713 | TTTGAGGTACAACAGACCGAAGG | 4058 |
| hs132681473 | GCTAATGATAATCTAGACAGAGG | 4059 |
| hs132678865 | TGAGCAGAAACTGTATACAGAGG | 4060 |
| hs132680779 | TGTCTTGCTATGAAACCTAGAGG | 4061 |
| hs132677722 | AATGTGACAGATATCACATGAGG | 4062 |
| hs132680465 | TAGACGAATGGAGGTACACGAGG | 4063 |
| hs132679506 | AAAATGAACACAGACTGCAGAGG | 4064 |
| hs132682987 | AGTGAAGACTCAATAACAGGTGG | 4065 |
| hs132679519 | GAATAGGTACAGATTCAGAGTGG | 4066 |
| hs132679244 | GAGGAAATAAGAAATTCAAGCGG | 4067 |
| hs132678720 | AAGCCATTAAAACCCCTCAGAGG | 4068 |
| hs132682309 | AAGTCAGAAACACATGTGTGTGG | 4069 |
| hs132680795 | ACAGAAAGTTGGAACCAAAGGGG | 4070 |
| hs132680701 | GGAATGCATAAACACATGGGAGG | 4071 |
| hs132679823 | GTTTGGTAAATGCATCACCAAGG | 4072 |
| hs132677331 | AATATGCTTTGGAAAACACGGGG | 4073 |
| hs132679786 | GATGGGAACCAGTCTCTAGGTGG | 4074 |
| hs132678006 | TATCACCACAGGCTTCCCAGCGG | 4075 |
| hs132678647 | AGAGAAATGCTTCCTCAGTGAGG | 4076 |
| hs132682712 | CTACTGTTAAGACACAGGATGGG | 4077 |
| hs132681830 | CATGGTTTTCATGAACTGGGCGG | 4078 |
| hs132681688 | TAAACATCAGAAGACCTCAAGGG | 4079 |
| hs132679438 | ATTCATAAGATCAATGACTGTGG | 4080 |
| hs132682911 | GTTCAATAAATTCCTCAGTGGGG | 4081 |
| hs132677900 | GAGAGACCGCAAGATCAGGAGGG | 4082 |
| hs132682194 | TATGGGATCAAAGCATCCAGAGG | 4083 |
| hs132680153 | GTTTCCGTACTCCCCTAGTGGGG | 4084 |
| hs132678892 | TATAGATTAGAAAAAAATCGGGG | 4085 |
| hs132683207 | AAATATACCGAATTGCTCTGAGG | 4086 |
| hs132681337 | GCAAGAGGAAGAACACGTTGAGG | 4087 |
| hs132677073 | TAATCTCAGAAATGCCACAACGG | 4088 |
| hs132678526 | GTTTATTTTCTCTTTCTGCGAGG | 4089 |
| hs132680953 | GGGTGGGAAAGGTTTCAGAAAGG | 4090 |
| hs132680518 | GCCTTGGGAAATGAATAGGTGGG | 4091 |
| hs132680700 | AGAGGAATGCATAAACACATGGG | 4092 |
| hs132681557 | TGTGTGTGTACATATATGGGTGG | 4093 |
| hs132677134 | GCAGGGAACAATGATACCTGCGG | 4094 |
| hs132678766 | CTATGAAAACATGCACTGGGTGG | 4095 |
| hs132680614 | GGTAGGAATGCATTTCCCAGAGG | 4096 |
| hs132679415 | GGATAAACATTAGCTCTGTGTGG | 4097 |
| hs132678562 | GCACAGTTGAGACTACACCTTGG | 4098 |
| hs132677630 | AGATTAAGAGAAAAAAAACACGG | 4099 |
| hs132682986 | AAATGCTCGCTTACTCACAGAGG | 4100 |
| hs132682815 | AGCGTTCTCTATCTCCACAAAGG | 4101 |
| hs132677780 | CTCCTCGTTCACATACACACAGG | 4102 |
| hs132679359 | TCTAGATAGTATTTCCGTGGGGG | 4103 |
| hs132680512 | TTGTTACTGACTTATCTGAGAGG | 4104 |
| hs132677835 | TATCAAGGTCTCGATCGAGAGGG | 4105 |
| hs132681367 | TCATACAGAAAGGACTCAGGAGG | 4106 |
| hs132681460 | CCAAGCAAAGCACCAAACAGTGG | 4107 |
| hs132681282 | GCAAAATGTCTTAACACTAGGGG | 4108 |
| hs132677929 | CAACTAAGATAGACACAAAGGGG | 4109 |
| hs132682928 | TTTGCATGAAGCATTAGTGGTGG | 4110 |
| hs132677631 | GAACTGTTGGTGAAGCAGAGAGG | 4111 |
| hs132679526 | TCATAGAAAAGGATTCAGGAGGG | 4112 |
| hs132678672 | GTAATGTTATGAAAGAAAGGGGG | 4113 |
| hs132680792 | TTACACATAAATATGAACGATGG | 4114 |
| hs132677083 | GCTGGGAATTACCTCATGAGGGG | 4115 |
| hs132678650 | TGAGTTCTGTGGCCTCACTGAGG | 4116 |
| hs132681620 | AATCTACCTAAAATTCACAGAGG | 4117 |
| hs132682150 | AGTTGCTGTGGAAAAACCAGAGG | 4118 |
| hs132678725 | CAAATTTAATCACCTCTGAGGGG | 4119 |
| hs132677822 | ATATGCATCACTCAATACCATGG | 4120 |
| hs132679336 | AAAACAGTTAGATGGTACCAGGG | 4121 |
| hs132681708 | TCTCCTGGTAGCAAACAATGAGG | 4122 |
| hs132678678 | CAATAAGTAATACAGTATAGGGG | 4123 |
| hs132680057 | TGCACACCAGCTATACACACAGG | 4124 |
| hs132682717 | GTGACTTCATGATAAAAAGGGGG | 4125 |
| hs132677881 | CAGAATAAGAAAGCACTAGGGGG | 4126 |
| hs132679756 | TAGTGTTTGATTGAGGACGGAGG | 4127 |
| hs132682519 | TTATCTTTAGAAATGACTGGGGG | 4128 |
| hs132678418 | GAGTGTGTTCCTGAGAGGAGGGG | 4129 |
| hs132678353 | TCTAGATTTGGAGAGACAAGGGG | 4130 |
| hs132680247 | GTAAACAGGCAAAGTCACAAAGG | 4131 |
| hs132678449 | TGAAGTGCCTGGGTACTGGGTGG | 4132 |
| hs132679921 | ATATTAAGAACAGATACACTCGG | 4133 |
| hs132681939 | GTCCTTTAGAAATTTCTCTGAGG | 4134 |
| hs132679362 | GATACTCCTCATTACCCCCACGG | 4135 |
| hs132678796 | ATCACTACCACTGTGCTGCGAGG | 4136 |
| hs132681956 | AGGGTGAAGGAACCGTTTGGGGG | 4137 |
| hs132681846 | CACAGGGAACTGGCACCACGGGG | 4138 |
| hs132682275 | ATGTGGCAGTTTAATGACAGAGG | 4139 |
| hs132677440 | ACCAAGGATGACTTCCCAGTAGG | 4140 |
| hs132677857 | GTTATAGCAGTGTAGGCTGGAGG | 4141 |
| hs132677638 | TATGGAATAGCTGAGACTGAGGG | 4142 |
| hs132678587 | TTATGTGTAGATACACAGACTGG | 4143 |
| hs132677132 | ATGCCCGGGTACTTCAAGCAGGG | 4144 |
| hs132682909 | GGGTTCAATAAATTCCTCAGTGG | 4145 |
| hs132681479 | TGAGTGATAAACATCCTGCAGGG | 4146 |
| hs132677617 | TGAGGTCGAAGCTTACGGCAAGG | 4147 |
| hs132678724 | ATTTGCTGTGATAAACAGTGGGG | 4148 |
| hs132682199 | AAAACTTAAAAAGCACCTAGAGG | 4149 |
| hs132679326 | TGACTACAAAAGGTATCAGGAGG | 4150 |
| hs132677700 | TAAGTCACATCCAGAAATCGGGG | 4151 |
| hs132678719 | AGACAAAGAGTAAATTACTGAGG | 4152 |
| hs132679358 | ATCTAGATAGTATTTCCGTGGGG | 4153 |
| hs132679994 | CTACTGGGAAGGTATGCCTGTGG | 4154 |
| hs132679797 | AGAGAAGGAGGATAACTAGGAGG | 4155 |
| hs132680425 | AGAGTCCCGGTAGAAACTGGAGG | 4156 |
| hs132677195 | TGGAGGTAACCAAAATGGAGAGG | 4157 |
| hs132681311 | AAGGGTACTAGTGTAAGACAGGG | 4158 |
| hs132679143 | GCATTTTGTGCAATGCTGAGGGG | 4159 |
| hs132683053 | AGAAATGAACAAGTATCCAGAGG | 4160 |
| hs132678841 | AGGCAATACAAGAAACCTTGAGG | 4161 |
| hs132678531 | AAGGACTCAAACTTTTCGCGGGG | 4162 |
| hs132681233 | GTGAGAGTAATTGAATGCTGAGG | 4163 |
| hs132679809 | GGAGCTTTAAGAGCACTTTGGGG | 4164 |
| hs132681582 | GTAAAAAAAAATGTCAAACAAGG | 4165 |
| hs132678482 | ACAGTGCCAGGATTTGAAGGCGG | 4166 |
| hs132680237 | TAAAGGGGATAATACCCTGAGGG | 4167 |
| hs132677057 | TTGGAATATACCAGTCAGAGTGG | 4168 |
| hs132679761 | ATATATGCCAGGAGACACCTGGG | 4169 |
| hs132680008 | AATATAACTTGTTTACTGAGGGG | 4170 |
| hs132677275 | CCCTTATCAAGTGAACTGAGTGG | 4171 |
| hs132679504 | GGACTAAGCATCCCCCTGAGAGG | 4172 |
| hs132681546 | TCGAATTGCTTCAGCCCAAGGGG | 4173 |
| hs132679792 | CATGCGCATAGTCATACACATGG | 4174 |
| hs132678835 | GGACATAGTTTTCAACAGAGAGG | 4175 |
| hs132678801 | AGAGTCAGATGTCAACCGCAGGG | 4176 |
| hs132678610 | TCAAGAATTATAAGGCGGGGAGG | 4177 |
| hs132677907 | CAGGGGCTCATAAAGTAGTGAGG | 4178 |
| hs132680546 | AGTATTGTCGGATATCCTCAGGG | 4179 |
| hs132680268 | AATGAGACTTAATTACACAAAGG | 4180 |
| hs132682625 | AAGAAACCAGAAAAATCACTGGG | 4181 |
| hs132678983 | CAAAACATCTCATCAGAACACGG | 4182 |
| hs132680633 | AGACAACAGGATGTTAGCAGTGG | 4183 |
| hs132677648 | CATACTTAAGATCAAGTGGGAGG | 4184 |
| hs132678932 | AACTTCTAATAAGTAGACTGAGG | 4185 |
| hs132679363 | GGATACTCACTCCTCTGACGTGG | 4186 |
| hs132677457 | TCGCATCTTTCTGATACATGAGG | 4187 |
| hs132677959 | CTAACTTTCAGAAGATTACGTGG | 4188 |
| hs132678017 | ATTTGCCAGTAGGATGAGGAGGG | 4189 |
| hs132679505 | TGATAATGATGCTTGATGGGGGG | 4190 |
| hs132677647 | CCCCATACTTAAGATCAAGTGGG | 4191 |
| hs132679966 | TTACAGTCCAGTTACTTGAGGGG | 4192 |
| hs132681790 | AGGAAAGCCCTGTAATGACCTGG | 4193 |
| hs132681488 | AACACTACCCATGATTACACAGG | 4194 |
| hs132680072 | TATGGCCAATTAGTTGAACATGG | 4195 |
| hs132680982 | TAAAAGCACAAGAGGCCCCGAGG | 4196 |
| hs132680188 | GTTTAAACTACACTATAATGGGG | 4197 |
| hs132683180 | ACTAATCTGTGTATCCTACAGGG | 4198 |
| hs132678288 | ATTCCAAGTACAGACAAGTGTGG | 4199 |
| hs132677565 | TAAACACTAAGTCTTACGAAAGG | 4200 |
| hs132677056 | TAAACTTTATGTACCCACCCAGG | 4201 |
| hs132682463 | TTACTGGACTTAAAAGAACATGG | 4202 |
| hs132677973 | TAATCATGAAAAGAGTGGTGAGG | 4203 |
| hs132677783 | TGTGTGTATGTGAACGAGGAGGG | 4204 |
| hs132682233 | ACATCAACAGTAAAGCTAGACGG | 4205 |
| hs132677629 | GATTAAGAGAAAAAAAACACGGG | 4206 |
| hs132681976 | CTATATAATTTATATCATGGGGG | 4207 |
| hs132680290 | AGGCACACCACTAGAACACGGGG | 4208 |
| hs132682448 | TTTGGTACGCTTTCAAACTGGGG | 4209 |
| hs132677882 | ACAGAATAAGAAAGCACTAGGGG | 4210 |
| hs132682002 | ATTTGAAACAACAAGCAAGGAGG | 4211 |
| hs132677683 | GTATGAAAAGGACACGAGAGAGG | 4212 |
| hs132677289 | CAGATAGGTAGGTTGACAAGTGG | 4213 |
| hs132682316 | GATCCTTTCCATAGACTCTGAGG | 4214 |
| hs132678912 | ACATTATTATCACAGCTGCAAGG | 4215 |
| hs132679096 | ATTGGGATACTCCTATGCCAGGG | 4216 |
| hs132678068 | GATGCGGGAAAGGTGGACTGGGG | 4217 |
| hs132681427 | GCAAAAAGCACAGTGTCAAGGGG | 4218 |
| hs132681104 | TAAGGGCGTAGGGATAGGAAAGG | 4219 |
| hs132681667 | AATATGTAGACATATTGGCAGGG | 4220 |
| hs132679000 | TTTTGTTTTAGATATTAGAGAGG | 4221 |
| hs132681588 | GGTTACATCTAACCTCACAAAGG | 4222 |
| hs132680945 | AGAATATGTCAGAATTCCTGGGG | 4223 |
| hs132677660 | TAGCTTCCAAGAATGAGGGAAGG | 4224 |
| hs132680396 | ATCTGAGGATGTGCTTGCAGTGG | 4225 |
| hs132677338 | TTGGCCTCAAAGTAACAGAAGGG | 4226 |
| hs132679371 | ACGCATTTCTACAAAAACCGTGG | 4227 |
| hs132679313 | TCACATGAATAAAGTTCCTGAGG | 4228 |
| hs132679115 | TGTATGGTGTCTATATACGTGGG | 4229 |
| hs132678271 | ATAATGATTTCCAATCAGGTAGG | 4230 |
| hs132682438 | CACCTGGAGAGTTTACTGAAAGG | 4231 |
| hs132679057 | ATATTTAGCACATGACTAGGTGG | 4232 |
| hs132679472 | TTCAAGAAAAATGTTACCAGGGG | 4233 |
| hs132678713 | GCTTATGTTAAGGAAGCATGGGG | 4234 |
| hs132682842 | GCTAGCGAGCTAAACCAAAGAGG | 4235 |
| hs132678067 | GGTGGACTGGGGATACAATGTGG | 4236 |
| hs132677311 | CACAAAGAATTGCAAAACTGGGG | 4237 |
| hs132678962 | GAAAGTGGAGAAAAGTTCAGAGG | 4238 |
| hs132682357 | AACTTTATAGTACCCTACCCTGG | 4239 |
| hs132680214 | GATGGTTTTGAGTACTCAGGAGG | 4240 |
| hs132680349 | TTAAATGTAAATAATCCGTGGGG | 4241 |
| hs132681768 | ATGGCCTTTTGGCATCTGAGAGG | 4242 |
| hs132682496 | GAAATGGCATATTAAAACAGAGG | 4243 |
| hs132679822 | CCTTCATATCTGTAATCATGAGG | 4244 |
| hs132678659 | GAAACTGTAACAGTTGTAAGGGG | 4245 |
| hs132677052 | AAGACCACAATCTACCTGGGTGG | 4246 |
| hs132680871 | GCAGTGTATGAAGATTCAGAAGG | 4247 |
| hs132678981 | TTATTAATTAAAGACTTACGTGG | 4248 |
| hs132680430 | GGATTGATTTCTCAATCTCGGGG | 4249 |
| hs132678307 | GATTACGTGTGAGTGGTGCTAGG | 4250 |
| hs132680694 | GAGGATTCTCAGTTAAGGGGAGG | 4251 |
| hs132679825 | TTACACATAAGCAGAAGGAGAGG | 4252 |
| hs132682632 | ATTAGCCTGTAATTTTACAGCGG | 4253 |
| hs132680891 | GTAAAGTGGCAAATAGTTGGGGG | 4254 |
| hs132677718 | GTTTCAAGAACAGTATACTGTGG | 4255 |
| hs132680462 | TTGGATGAGTAGACGAATGGAGG | 4256 |
| hs132679396 | ACGCGGCACAATAAAACCCAAGG | 4257 |
| hs132683073 | AATGAGCTTCCTCAAACACAGGG | 4258 |
| hs132681537 | AGGTAACTGAAAACTTTCAGTGG | 4259 |
| hs132678364 | ATTCCAGGAAAGCTGCCATGTGG | 4260 |
| hs132681069 | TCAAGGACCTCAGAGTCGAGTGG | 4261 |
| hs132679501 | ACGAGATTCTTTCCTCTCAGGGG | 4262 |
| hs132681841 | TTGGGCCAGTGTAGGCCCCGTGG | 4263 |
| hs132681618 | GAATTTGACTGAATAGAAAGTGG | 4264 |
| hs132679907 | CTTTGCCAATGAAATGTGTGTGG | 4265 |
| hs132679238 | TTTCGTATGAAACCTCACATTGG | 4266 |
| hs132677685 | AGAGAGGACATGATATCCAAGGG | 4267 |
| hs132678056 | GTATGGGGAGAGTACAGGTGTGG | 4268 |
| hs132680802 | GGGAAACACTAACACAATGGTGG | 4269 |
| hs132680278 | ATTACAGACTAAATACCCCCTGG | 4270 |
| hs132680061 | TCAAAAAACGTAGAACGGAAGGG | 4271 |
| hs132679066 | CTGAACATGTGTAAAGCAAGGGG | 4272 |
| hs132677567 | TAGTTGCATTTACAATACAGTGG | 4273 |
| hs132678799 | GTGTACGTGTGTGTATGCATGGG | 4274 |
| hs132680558 | GAAGTATTAGCGAAGTGACAGGG | 4275 |
| hs132682789 | ACCTGGTGCAGAGGTCCCTGAGG | 4276 |
| hs132682133 | ATGTATGCATGTGTTATGGTAGG | 4277 |
| hs132679172 | AATGTGCTGGATGAATAAGAGGG | 4278 |
| hs132679169 | ATATAGCAAATATTCAACAATGG | 4279 |
| hs132678412 | ATAGTATCTAGGCTCAGAGACGG | 4280 |
| hs132681292 | ACACCTCCACACATATGGGAAGG | 4281 |
| hs132682477 | TTTTTTTCTACATAAAAACGTGG | 4282 |
| hs132678964 | CATTACGTTTCCATTTGCTGCGG | 4283 |
| hs132682085 | AAGTGATCACCAGAGACACATGG | 4284 |
| hs132677259 | GTGTATGTTGAAGATGAAAGGGG | 4285 |
| hs132680358 | AAAAACTGTCTAGAAACCACAGG | 4286 |
| hs132681754 | ATTGGAAATCAACTGCATGAGGG | 4287 |
| hs132681457 | TACATCCATGAAGCAGCAAGGGG | 4288 |
| hs132679810 | GAGCTTTAAGAGCACTTTGGGGG | 4289 |
| hs132677124 | TTTAGACTATTCCTACAACCAGG | 4290 |
| hs132679670 | CTACTGCCTATCTCTACCAAAGG | 4291 |
| hs132678265 | GGCCTGCTGTATTCCCTGGGTGG | 4292 |
| hs132677223 | AAAAAACCACATCAGACCGTGGG | 4293 |
| hs132683270 | TGAACTTGGTAAAGACCAAGAGG | 4294 |
| hs132682297 | AAAAATGATTAACAAAACACAGG | 4295 |
| hs132680486 | AGAGAACCAGAATGATTTTGGGG | 4296 |
| hs132678507 | ACATAAGGATCTACATGCAGTGG | 4297 |
| hs132682441 | GTAAACTCTCCAGGTGAGAGGGG | 4298 |
| hs132678845 | CTTAGCAAGAAGAATTGGAGTGG | 4299 |
| hs132677300 | AGTAGAAAGTAAAGAACACAGGG | 4300 |
| hs132678487 | GACAAAACCCCAGAGAAAGGGGG | 4301 |
| hs132680222 | AAATAGGTAGTGCCTTACAAAGG | 4302 |
| hs132678324 | AAATCAAAGATAACACCACAGGG | 4303 |
| hs132683017 | TCCTCACTATTTCTGAAACGAGG | 4304 |
| hs132681414 | AAGATTCAGCTACATCTGGTGGG | 4305 |
| hs132681788 | TGGATCACCAGGTCATTACAGGG | 4306 |
| hs132679824 | AAGGCTTACACATAAGCAGAAGG | 4307 |
| hs132678277 | TGAGTGACAGTTAAGTGGCAGGG | 4308 |
| hs132682588 | TGACAGGCATGATAGAAGCAGGG | 4309 |
| hs132682596 | GAACAGCCTGCATATTGCCACGG | 4310 |
| hs132682109 | TCTTTCAATTAAATATCGGGAGG | 4311 |
| hs132678064 | ACATTCATCTCAATTGAGCAAGG | 4312 |
| hs132679043 | GATAAACAGCATTTATACTGTGG | 4313 |
| hs132677880 | AAAGCACTAGGGGGCAACTGTGG | 4314 |
| hs132680740 | TACATGGCATCCAGAGAACAGGG | 4315 |
| hs132682283 | GACAGCCTCTACAAGTAGCAGGG | 4316 |
| hs132681370 | TCAGGAGGTCAATGTAAAGGAGG | 4317 |
| hs132681288 | AACTCTATCCAGGAGACATGGGG | 4318 |
| hs132682006 | AAGGAAAATGACAGAAATAGCGG | 4319 |
| hs132679621 | AATTTGTGTGTGATGTGTGGTGG | 4320 |
| hs132678589 | TCAATCCCCTCATATACAGAGGG | 4321 |
| hs132677763 | TGAGCAAAGCAGGAAAGGGTCGG | 4322 |
| hs132680549 | CATGTGCCTAGCACAAATAGAGG | 4323 |
| hs132677465 | TTGACTATCATCACATTCAGGGG | 4324 |
| hs132677370 | CCTTAGCAGATAAAATCAGTAGG | 4325 |
| hs132682647 | GTTGTGCTCATAGGGCACAATGG | 4326 |
| hs132681363 | CTTCTCTTGTAGATCACCAGTGG | 4327 |
| hs132677344 | GGTGATAACATTTAACAGGAGGG | 4328 |
| hs132681325 | GCTAATATATATAATTAAGGAGG | 4329 |
| hs132678664 | GTAATGTTGCCAGTACTGGAAGG | 4330 |
| hs132679548 | TTTACTATCCCAAAGTTGGGGGG | 4331 |
| hs132681248 | GTTCTTGCTATCATTAAGAGGGG | 4332 |
| hs132681697 | AAAGACAGGATATATAAGCAGGG | 4333 |
| hs132683262 | TGACTCTAGATGATTATAGGTGG | 4334 |
| hs132678065 | TGAATGTGTTCAAAAAAACCAGG | 4335 |
| hs132681141 | TAGGTAAATTAAATAATGGGAGG | 4336 |
| hs132679826 | TACACATAAGCAGAAGGAGAGGG | 4337 |
| hs132677924 | TAAAGTTTAAATGTACCTAGAGG | 4338 |
| hs132680324 | GAGTGTCTCCAGTGCCAGAGAGG | 4339 |
| hs132681195 | GTTGTCCCAGTAGAATCAGTAGG | 4340 |
| hs132677051 | CAAAAGACCACAATCTACCTGGG | 4341 |
| hs132679534 | AGATAAATATCGGAATCTGTGGG | 4342 |
| hs132680068 | ATTTGCAGTAGAGGAAACAAAGG | 4343 |
| hs132678250 | AGGAACTTAAAGTTCCCACTAGG | 4344 |
| hs132679436 | AATGATGGTGAAACTGGCGGTGG | 4345 |
| hs132678041 | TTCCCTCTAACAAACAGCCATGG | 4346 |
| hs132677943 | CATATACATTTCCCCAACCAGGG | 4347 |
| hs132678591 | ACCTGCCCTCTGTATATGAGGGG | 4348 |
| hs132679085 | TATAGTTCCAGCAGAAAGCGAGG | 4349 |
| hs132679547 | GTTTACTATCCCAAAGTTGGGGG | 4350 |
| hs132677421 | TTAGGCTTCAGATCTAGTAGAGG | 4351 |
| hs132677233 | AGTATGTTAGATTTTACCTGGGG | 4352 |
| hs132679604 | ATGGTATCACCTACTGTCAGAGG | 4353 |
| hs132680579 | CAAAAGGTAAGAGAATAGGATGG | 4354 |
| hs132681307 | GCTTTCATACAATACCCTGAAGG | 4355 |
| hs132682549 | GACACAATTATAAAACCAAGAGG | 4356 |
| hs132681210 | ATGTTGGAATCTACAGACCATGG | 4357 |
| hs132680331 | AGTATTACCGGTTGTCTAAGGGG | 4358 |
| hs132681064 | ATTCCAATACGATTGCTCCAAGG | 4359 |
| hs132677739 | AGATTTACCTGATGGTGAGGTGG | 4360 |
| hs132681511 | GGATGAAAGAGGAGACAAAGGGG | 4361 |
| hs132680870 | CAGTGTATGAAGATTCAGAAGGG | 4362 |
| hs132680337 | TATCCATTAACAGCTAAGGAAGG | 4363 |
| hs132681400 | GAAGCCAAGATGAGGTAAAGGGG | 4364 |
| hs132681586 | AAATTCTGTCTAATTTCACATGG | 4365 |
| hs132679690 | GTAGGACAGTCAAAGAGTGGAGG | 4366 |
| hs132677177 | CATATAGCATCCAAGACACAAGG | 4367 |
| hs132677067 | ATAGATGAAAAGCTCTCACAGGG | 4368 |
| hs132677574 | TTATAAGCTATAATTTCCAGTGG | 4369 |
| hs132680477 | GTAGTGAAGTTGCTTATCTGAGG | 4370 |
| hs132681923 | TCAATAAAACCACAAACACCAGG | 4371 |
| hs132677891 | AAAGGAATGGCAAGGCACATGGG | 4372 |
| hs132677168 | TTATGAAAAGAAAAAATCCAGGG | 4373 |
| hs132677655 | ACTTGATCTTAAGTATGGGGAGG | 4374 |
| hs132679443 | TGTTATGGCTAGGATAACTTGGG | 4375 |
| hs132681304 | TATTACTGCAGTACAAGCCAGGG | 4376 |
| hs132679240 | AATCTATAGTGAGATATGAAGGG | 4377 |
| hs132678785 | TTAATTCTCATGGTCATGCGGGG | 4378 |
| hs132679404 | GTGAACATCCACATGTACCTGGG | 4379 |
| hs132681158 | AGATTACCTTTCTGGTAGGGAGG | 4380 |
| hs132683195 | ATAAAAGTTTACAAAGACAGAGG | 4381 |
| hs132678980 | TTAATTAAAGACTTACGTGGAGG | 4382 |
| hs132677832 | GGCAGAGCCTCCATTCCAGAGGG | 4383 |
| hs132678130 | ATACCAGAGTAAGTACAGCTAGG | 4384 |
| hs132678967 | AGTATTCTGCCAAAATAAAGGGG | 4385 |
| hs132682157 | GCTGCCAACACCACAGTTGGGGG | 4386 |
| hs132681351 | ACATTTACTAGGCGTTAACAAGG | 4387 |
| hs132678109 | TGCTCCCATGCATACCCCCGTGG | 4388 |
| hs132680448 | CTCAGGCTTTGGAAACAGGGGGG | 4389 |
| hs132681403 | GTTACTTTGAAGCCAAGATGAGG | 4390 |
| hs132679019 | AAGAAAGTTTGTGAACCACTGGG | 4391 |
| hs132678177 | AATATTGTCAAAAATCCACCTGG | 4392 |
| hs132679583 | ACTTCTAGTATTCAGAAGAGAGG | 4393 |
| hs132682178 | TAAAGTATAGAAGATGTCCAAGG | 4394 |
| hs132681191 | TACAACCTACTGATTCTACTGGG | 4395 |
| hs132681845 | CCTGTGCTAAGAGGCAGCCAGGG | 4396 |
| hs132682060 | TGTCATGTACAGTGCTAGGTTGG | 4397 |
| hs132678777 | TTGCTAGGCTTGGCTTTCAGCGG | 4398 |
| hs132683043 | AGGATGATACTGGGACAAAGTGG | 4399 |
| hs132677245 | GTGGGAGTGCAAGTCAATAGGGG | 4400 |
| hs132681951 | GGTGGTAGAGACTAGGCTGAAGG | 4401 |
| hs132682938 | TGAAGAATTATATTGTTGTGGGG | 4402 |
| hs132677746 | AAGGGAACTAAAAGAATCGGAGG | 4403 |
| hs132678693 | CATCATCCTGCATCATGTGTGGG | 4404 |
| hs132677246 | GAGTGCAAGTCAATAGGGGAAGG | 4405 |
| hs132678117 | CTATATAGTATGTCCTACCACGG | 4406 |
| hs132680538 | AAGTAATAAGACATTTCCTAGGG | 4407 |
| hs132677103 | ACTAAAGAACATGTAACAGTGGG | 4408 |
| hs132680071 | CTAATTGGCCATAGTTACTGAGG | 4409 |
| hs132681945 | AAGGGAAGAAGACATTGTGTCGG | 4410 |
| hs132683021 | ATATTGATACAGGAAACTTACGG | 4411 |
| hs132677866 | AAACATATCTCCCTACAGAAGGG | 4412 |
| hs132682440 | TTTACTGAAAGGCATACCTAGGG | 4413 |
| hs132678852 | GAACATTTTCTAATTGAGGGTGG | 4414 |
| hs132678415 | AACAAGAGTGTGTTCCTGAGAGG | 4415 |
| hs132679493 | TCAAAGAAGACCATAGCACTAGG | 4416 |
| hs132679067 | GTAAAGCAAGGGGTCAGTTGCGG | 4417 |
| hs132677483 | GTTATATCATTTGACATCGGGGG | 4418 |
| hs132682709 | ATCACCTACTGTTAAGACACAGG | 4419 |
| hs132680951 | TTCAGAAAGGAGAAACCCATGGG | 4420 |
| hs132683070 | GAGTTAAGATTCGGGGACAGTGG | 4421 |
| hs132679568 | TGAGCATCTACACTGTGTCATGG | 4422 |
| hs132681832 | GAACTGGGCGGACTGCTACAGGG | 4423 |
| hs132680958 | AGTATATTTCTGAGGACTGGGGG | 4424 |
| hs132677922 | TTAATGTTTTCATTGAACGCAGG | 4425 |
| hs132678021 | TTCATAAAATGGGAACAAAGTGG | 4426 |
| hs132680433 | TCTCAATCTCGGGGTATGTGAGG | 4427 |
| hs132680526 | GCCTAATTCTACAGTAACTGGGG | 4428 |
| hs132681789 | CATCTTCTTTAGAACCAAGTCGG | 4429 |
| hs132680654 | TCCAGCATATCCTCCATGCAGGG | 4430 |
| hs132677936 | GCATCAGAATAATTGCTAGAGGG | 4431 |
| hs132679566 | TCTGGCCTTAAGTTCAAAAGGGG | 4432 |
| hs132678605 | GAAAATCAAGAATTATAAGGCGG | 4433 |
| hs132677539 | ATTGCATTGGAGGAACTGCATGG | 4434 |
| hs132677247 | TATTGACTTGCACTCCCACAGGG | 4435 |
| hs132679888 | ATGCTGGCATGAGGAGAGTGAGG | 4436 |
| hs132680224 | CTAATCAAATACAAGAAACAGGG | 4437 |
| hs132677181 | TGGATGCTATATGATCCTGATGG | 4438 |
| hs132680799 | ACACAATGGTGGCATGATAGGGG | 4439 |
| hs132678755 | GCTATCACATTTCCCACCATAGG | 4440 |
| hs132678643 | GCCTTCATTTCTGTGTCACGTGG | 4441 |
| hs132677354 | AGCCAAGGAGATCAATGCCAGGG | 4442 |
| hs132679350 | AACCTTCTAGTCAAACTCCAGGG | 4443 |
| hs132682168 | AGAACTGCTTTGTCCCCCAAAGG | 4444 |
| hs132678258 | GTCACCCTACTATTTCCTAGTGG | 4445 |
| hs132677345 | AGGTGATAACATTTAACAGGAGG | 4446 |
| hs132679083 | ATGTCCTGTAAATGTTCGAGTGG | 4447 |
| hs132680161 | AAATCCACCCACCCCACTAGGGG | 4448 |
| hs132678821 | TCAAGGTTGATAAGGGTCAAGGG | 4449 |
| hs132683071 | CAATCAGTCAGATTAAAGAGAGG | 4450 |
| hs132677229 | CCTGGGGTATTCATACTACAGGG | 4451 |
| hs132680657 | GTATACACCAATACTTATGAGGG | 4452 |
| hs132681053 | GCAAACAATAAGAAGCAGATGGG | 4453 |
| hs132681109 | AGATCTACATCAGCAGCCAAAGG | 4454 |
| hs132681114 | GACATAATGTCTGATGGCATAGG | 4455 |
| hs132677488 | CTGAGCACACTGGAGTCCTGAGG | 4456 |
| hs132682602 | AGGATCCCAGCCTTCTTCCGTGG | 4457 |
| hs132677824 | TCACTCAATACCATGGTAGGAGG | 4458 |
| hs132682562 | CTTGGCATTTCGGGAAACAGCGG | 4459 |
| hs132679258 | GCAAATTTCAGGTCTCTGAGGGG | 4460 |
| hs132679820 | CTCATGATTACAGATATGAAGGG | 4461 |
| hs132681806 | ATTCCACTAAACATAACGATGGG | 4462 |
| hs132683147 | TATTTTGTAAAGCTACGGAAGGG | 4463 |
| hs132677399 | TTATAGGGGATATTTAAAGGTGG | 4464 |
| hs132679866 | TTAACCTCATCCTCATAATGGGG | 4465 |
| hs132678495 | AGATGCCCCCCCTTTCTCTGGGG | 4466 |
| hs132677224 | AAAAAAACCACATCAGACCGTGG | 4467 |
| hs132680943 | AACCTGCTGCAGAACACCCTAGG | 4468 |
| hs132683164 | AGGCAGTAATCTGAGCTAGAGGG | 4469 |
| hs132679985 | GATTAACTTTTGGATATTGGGGG | 4470 |
| hs132677521 | TTTGCCTAAGCAGCTTTGGGTGG | 4471 |
| hs132681501 | GCACTCCCGTAGGTACTGAAAGG | 4472 |
| hs132678489 | CAAAACCCCAGAGAAAGGGGGGG | 4473 |
| hs132678749 | TGGCATATCTAGCCTATGGTGGG | 4474 |
| hs132677972 | ATCTCTAATCATGAAAAGAGTGG | 4475 |
| hs132679369 | TCTGCAACATGCTGAATCCACGG | 4476 |
| hs132678308 | AATAAATGATTACGTGTGAGTGG | 4477 |
| hs132678203 | GTATGACTAAGAGTGTGGATTGG | 4478 |
| hs132682018 | GGGCAAATTTCAATTTTATGCGG | 4479 |
| hs132680981 | AAAAGCACAAGAGGCCCCGAGGG | 4480 |
| hs132681566 | CTATAAAGCTATAAAATGAGTGG | 4481 |
| hs132678772 | TCACGTCCAGAGGCACACACTGG | 4482 |
| hs132680561 | AAGTTGGAAGAAATATTGGAAGG | 4483 |
| hs132681294 | CTTCAACCTTCCCATATGTGTGG | 4484 |
| hs132680369 | TCAGGAGTAGTAGTAACTCATGG | 4485 |
| hs132679906 | ACATTACAAACTCTGATGAGTGG | 4486 |
| hs132680829 | CATCCAGTGTAAAGGTGCAGAGG | 4487 |
| hs132681361 | ATCACCAGTGGGCATTCCTGAGG | 4488 |
| hs132678204 | AATCTGTATGACTAAGAGTGTGG | 4489 |
| hs132681771 | GATGCCAAAAGGCCATGACTGGG | 4490 |
| hs132678688 | CCTTGCTTACACGATCATTGTGG | 4491 |
| hs132680362 | CTCTTAATCCCATCATAAAGGGG | 4492 |
| hs132680880 | CAGAAGGACCGGAGACAGGTAGG | 4493 |
| hs132682538 | AATCCCCAACTACAATGCGTTGG | 4494 |
| hs132677227 | GAATAAAACTGAGCACCGAAAGG | 4495 |
| hs132680321 | TCTCCAGTGCCAGAGAGGGAGGG | 4496 |
| hs132682807 | TATGCACATATTATATAGTGAGG | 4497 |
| hs132682962 | GTCAAGATCTCAGTAACACTGGG | 4498 |
| hs132678756 | GGGTGTTAAGAAAACATGACAGG | 4499 |
| hs132677415 | GAAACGGTATGGTACAAGGTTGG | 4500 |
| hs132679217 | ACAGAAGTGTCAAAGTTGAGAGG | 4501 |
| hs132678464 | TGACCGTACAGAGATATGAAAGG | 4502 |
| hs132682716 | TGTGACTTCATGATAAAAAGGGG | 4503 |
| hs132680883 | AATTTTGTCCAATTCGCAGGTGG | 4504 |
| hs132683235 | TGGAGCCAAAACAATCCACTAGG | 4505 |
| hs132683143 | CAAATGACGCCACAACAACAAGG | 4506 |
| hs132680048 | TTTACCCATAACGTAAAGGAAGG | 4507 |
| hs132678542 | TAGATATTAAGGCCTGTGGGGGG | 4508 |
| hs132678717 | TAAATTACTGAGGAGGAAGACGG | 4509 |
| hs132680134 | AAGCTCAGTCTACTTTATCAGGG | 4510 |
| hs132678178 | TGGTATAGCAATTTTCCAGGTGG | 4511 |
| hs132680469 | TTAACTTCCATAATCAAAGGAGG | 4512 |
| hs132682609 | TTGTATGGTAGTTACAACATTGG | 4513 |
| hs132677820 | TCAGTGACTCTAGCTGAGAAGGG | 4514 |
| hs132678607 | AAATCAAGAATTATAAGGCGGGG | 4515 |
| hs132677071 | GAGACACACTATTAAATGAGTGG | 4516 |
| hs132680661 | ATAAGTATTGGTGTATACAGTGG | 4517 |
| hs132679489 | ATGAAACATTCAGTAGCAGTGGG | 4518 |
| hs132682873 | TTTCTTGTAATGCACATGGAGGG | 4519 |
| hs132678257 | TCACCCTACTATTTCCTAGTGGG | 4520 |
| hs132682747 | ACCACAGTCACTGAAGCCCTGGG | 4521 |
| hs132678370 | AGGATTTTGGTTATACCAAGTGG | 4522 |
| hs132682041 | AACAAATCCTAATGAACCCAGGG | 4523 |
| hs132680184 | GGTGAAGAAAGGAGAGTCGTGGG | 4524 |
| hs132680784 | GGCAAGCTTGCCTAAAAGTGAGG | 4525 |
| hs132681999 | TTGTGGAGAGAACTACGCTAGGG | 4526 |
| hs132678213 | AATCAATTTCAGGCACTGAACGG | 4527 |
| hs132679361 | GGAGTATCTCGCCACGTCAGAGG | 4528 |
| hs132677986 | GAGAGGCATAGGGAGAATAACGG | 4529 |
| hs132682551 | AAAAACCTAACTTTAGAACCCGG | 4530 |
| hs132678581 | GAACGTTTTATCATGATCTGGGG | 4531 |
| hs132678814 | TTACTGTGCTAATCCACACCTGG | 4532 |
| hs132679486 | GTTATAATCCACATGATACCAGG | 4533 |
| hs132678262 | CTATACAAACATACCACCCAGGG | 4534 |
| hs132679945 | TCACATACTGAGAACTGCATAGG | 4535 |
| hs132677376 | TTGAACACTTGCTAGCTGCAAGG | 4536 |
| hs132680288 | GCAGGCACACCACTAGAACACGG | 4537 |
| hs132677597 | GATAATGATATTTTAAACCAAGG | 4538 |
| hs132678083 | GTTTGACATGACCGTAATGGAGG | 4539 |
| hs132681928 | GTACACTATTTGTCAACCAAAGG | 4540 |
| hs132681665 | ACATGCCCTTTATGGCACAATGG | 4541 |
| hs132682801 | TTAGCTTACCTATAACAAAGTGG | 4542 |
| hs132682255 | ATTCACACATCAATCAGAAGTGG | 4543 |
| hs132681523 | TACACTATAAGATAAATGTAGGG | 4544 |
| hs132682888 | GAGAGATTGAAAGACTCTGTAGG | 4545 |
| hs132680857 | ACTCTGTTGGCACATTGCAGGGG | 4546 |
| hs132677430 | CCATACACAACTGCACCGTAGGG | 4547 |
| hs132680587 | AATTTTCTGTAAAGTAGCAGAGG | 4548 |
| hs132678316 | AATTTAATCACAGCAGTCAAGGG | 4549 |
| hs132678635 | CCTCTCGCGTCATAGTTTGGGGG | 4550 |
| hs132679806 | ACATAGTACAAAATTCATAGAGG | 4551 |
| hs132681490 | ACACAGGTTCATAATGCCACAGG | 4552 |
| hs132681094 | AGACAAATCTAGAAACAACTAGG | 4553 |
| hs132681348 | AATGTGTTACAGTAAGGAGGAGG | 4554 |
| hs132682916 | TCTGTAGTAGAGAATGTTGGAGG | 4555 |
| hs132682257 | ACTGGAATCCAGGAGCCAGATGG | 4556 |
| hs132680431 | TCAATCCTCCAGTTTCTACCGGG | 4557 |
| hs132677343 | TAAATGTTATCACCTGGAGGTGG | 4558 |
| hs132682092 | TAGAATTTGTAGGAGTAAGGAGG | 4559 |
| hs132681433 | ATGAGGCCTAAGATTTGGAGTGG | 4560 |
| hs132682759 | TTTTGAAGAGAAAATGTGGGTGG | 4561 |
| hs132678016 | GGATGAGGAGGGCATAGCAGAGG | 4562 |
| hs132677714 | CTGTGTGTGATCCATGGGGTAGG | 4563 |
| hs132681438 | ACAGCCATCAAGGTGTACTTGGG | 4564 |
| hs132682173 | GTATTTGCTTTTCATTGTGGGGG | 4565 |
| hs132682917 | AGGTCTGTAGTAGAGAATGTTGG | 4566 |
| hs132678049 | GGAGAAGAGGAAGGTCTGAAAGG | 4567 |
| hs132677966 | TCAAACCTGTAGCTCTATGGAGG | 4568 |
| hs132680836 | GACTGGTATTGCTAGTAGAACGG | 4569 |
| hs132678518 | GAAGCTGTTGAAGAGCCTTGTGG | 4570 |
| hs132682017 | TCAGCTAAGCATGCTAACCTCGG | 4571 |
| hs132679463 | GATCAGAGGCTTCAGTAGGGAGG | 4572 |
| hs132680780 | TTCATAGCAAGACAATAGATGGG | 4573 |
| hs132678358 | TCAAGCTGAATACAATTCAGTGG | 4574 |
| hs132680255 | TAATCACCTACCCCGACCAATGG | 4575 |
| hs132678132 | TCAAAGATGTAGACTGACACTGG | 4576 |
| hs132679243 | GTAGAACTGTATGTACATGAAGG | 4577 |
| hs132679147 | CATGTAGCTAAGGTTGCTAACGG | 4578 |
| hs132680814 | CCTTGGGATGGGAAACACAATGG | 4579 |
| hs132681308 | CTTTCATACAATACCCTGAAGGG | 4580 |
| hs132677409 | CTAATTACAATCTATCCCAATGG | 4581 |
| hs132677135 | GTTCCCTGCTTGAAGTACCCGGG | 4582 |
| hs132681689 | GTAAACATCAGAAGACCTCAAGG | 4583 |
| hs132680052 | ACACAGCTGATATAATTTGGTGG | 4584 |
| hs132677841 | ACATAGGCAATAGTAAATCAGGG | 4585 |
| hs132678460 | TTGAGCACTGTGTTTGCTGGAGG | 4586 |
| hs132681251 | AGTATAATATGTGCAAAACTGGG | 4587 |
| hs132680128 | TGTTACTAGAACTAAAATGAGGG | 4588 |
| hs132679580 | TTTGACTGGGCTATTCTGGGAGG | 4589 |
| hs132679714 | GCATGTCTAAGAACATCCCTAGG | 4590 |
| hs132683038 | CGAGCAGAGCTATTGTGCCATGG | 4591 |
| hs132680834 | TCTATTGGAGGAAATACAGATGG | 4592 |
| hs132679497 | AGGTAATTGGGAAATCCAGTTGG | 4593 |
| hs132682470 | GTGGTAAGCAGTCTCCAGAATGG | 4594 |
| hs132678869 | ATAAAGGGTTCAAAAATCTGTGG | 4595 |
| hs132680089 | TACAATTTCCTCAAAAACTGGGG | 4596 |
| hs132678686 | CCACAATGATCGTGTAAGCAAGG | 4597 |
| hs132681106 | GAGAACACTTTTTAGAGCCAGGG | 4598 |
| hs132677915 | AGCTCCAAATTTAAGAAACACGG | 4599 |
| hs132681850 | CCTGGCTGCCTCTTAGCACAGGG | 4600 |
| hs132680952 | TTTCAGAAAGGAGAAACCCATGG | 4601 |
| hs132681899 | AACACTTTGGTAACAACAGTAGG | 4602 |
| hs132681805 | CATTCCACTAAACATAACGATGG | 4603 |
| hs132681360 | GTGATCTACAAGAGAAGTTGGGG | 4604 |
| hs132682026 | CCTAGTCTTGCAAATGCTAGGGG | 4605 |
| hs132679256 | TTGGGTAACGAGATCACTAAGGG | 4606 |
| hs132677661 | TATATAGCTTCCAAGAATGAGGG | 4607 |
| hs132680607 | ACCCTTCACATGATAAAATGGGG | 4608 |
| hs132677303 | ATTACAAAAAGGACAAGCCATGG | 4609 |
| hs132681461 | ACCAAACAGTGGCATTGAAGAGG | 4610 |
| hs132677782 | CACAGGCATCTAGATATGGCAGG | 4611 |
| hs132683113 | TATATGTTGCGGCAATGAAGAGG | 4612 |
| hs132681341 | GTCTTGATGATGCCAATGCTAGG | 4613 |
| hs132682127 | TACCAAGTTTCCATTTACAAGGG | 4614 |
| hs132678319 | TAATTTGTCTTGGAATGATGCGG | 4615 |
| hs132682146 | CAACATAATAGGACAGCCCAGGG | 4616 |
| hs132680330 | GTATTACCGGTTGTCTAAGGGGG | 4617 |
| hs132679403 | GGATTGATCCCAGGTACATGTGG | 4618 |
| hs132678674 | GTGTAATGTTATGAAAGAAAGGG | 4619 |
| hs132678734 | ACAAACAGATGAGTTTCAGTGGG | 4620 |
| hs132679462 | GCAGATCAGAGGCTTCAGTAGGG | 4621 |
| hs132677985 | CTATGCCTCTCACAGCCAGAAGG | 4622 |
| hs132681182 | AGTTTGTAAGTATATTAGGAAGG | 4623 |
| hs132680423 | CATTAACTCAATCAGAGTCCCGG | 4624 |
| hs132683247 | TAAACCCAAGGCTTTAAGAGTGG | 4625 |
| hs132678486 | AGACAAAACCCCAGAGAAAGGGG | 4626 |
| hs132682288 | ATAAAAGAGTGCCCAGATGAGGG | 4627 |
| hs132681153 | ATATTTTGTACACATATGAAAGG | 4628 |
| hs132681875 | ACATAAAGAAGACTTAAACTAGG | 4629 |
| hs132679538 | TGCCATGGCATGAAATCCAAAGG | 4630 |
| hs132677705 | TCAATGGTAGTTGGTCATGATGG | 4631 |
| hs132677055 | GTACCCACCCAGGTAGATTGTGG | 4632 |
| hs132680245 | GCTCAGAGCTCACCTACTAAGGG | 4633 |
| hs132679512 | AGTCTGACTTTGCTCAGTGAAGG | 4634 |
| hs132681362 | TTCTCTTGTAGATCACCAGTGGG | 4635 |
| hs132677418 | TCTATGAGTACTCAGTTCCAGGG | 4636 |
| hs132681971 | GCTTACTAATGGATGTCACTAGG | 4637 |
| hs132682231 | GTCCTGCTAGATCAGGCATAGGG | 4638 |
| hs132678704 | CAGCTGATCTATCACGTCATGGG | 4639 |
| hs132680853 | GCTTAGGGAGATCACTCTGTTGG | 4640 |
| hs132677938 | TGACTACACTTCTGACACCCTGG | 4641 |
| hs132682000 | ATTGTGGAGAGAACTACGCTAGG | 4642 |
| hs132678488 | ACAAAACCCCAGAGAAAGGGGGG | 4643 |
| hs132682290 | GGGAGGATACACCCTCATCTGGG | 4644 |
| hs132681707 | CTCCTGGTAGCAAACAATGAGGG | 4645 |
| hs132681911 | AATTCCATTGGAATGACGGAAGG | 4646 |
| hs132683088 | ATCATGTTCTCAAGAAGACCAGG | 4647 |
| hs132678802 | TATGAAAGTGACAAAGCAAGTGG | 4648 |
| hs132678131 | GTTCCTAGCTGTACTTACTCTGG | 4649 |
| hs132679594 | AGATGTTTATATTCTGACGAAGG | 4650 |
| hs132679429 | AGTGTCAATAAAGGATTCAGAGG | 4651 |
| hs132677654 | CTTGATCTTAAGTATGGGGAGGG | 4652 |
| hs132680101 | CTGTATTCTGTAATTGCTAGGGG | 4653 |
| hs132678862 | TAGTAATGCTTATCTTGCCGAGG | 4654 |
| hs132677219 | ACATCAGACCGTGGGAACGGGGG | 4655 |
| hs132679759 | ATGTAATAGTCAATACGCCCAGG | 4656 |
| hs132680315 | GGAGGCAAGCATAGATCTTGGGG | 4657 |
| hs132681115 | CTGATGGCATAGGCTCCAGATGG | 4658 |
| hs132682003 | TTTGAAACAACAAGCAAGGAGGG | 4659 |
| hs132679114 | TTGTATGGTGTCTATATACGTGG | 4660 |
| hs132679661 | AATGTTATTGAGTTTATCTGTGG | 4661 |
| hs132679194 | TGTTAAACCTAGCAAAAGAGTGG | 4662 |
| hs132680766 | GCTTCAGCCTACCTTAGACTAGG | 4663 |
| hs132679420 | TTAAAATATTGAAATAGCGAGGG | 4664 |
| hs132681870 | GTGTATTTGCAGACTATCAGTGG | 4665 |
| hs132678314 | ATTAGCACATCTTAACCCATAGG | 4666 |
| hs132682673 | AATTGATCGCGATAGCAGTAGGG | 4667 |
| hs132679829 | GAGCTAAAAGGCTCCCCCAAAGG | 4668 |
| hs132677092 | TATGCTAGTACATCAGACATAGG | 4669 |
| hs132682968 | GCAAAGTACCTAAGTAACAAAGG | 4670 |
| hs132680461 | ACATTGGATGAGTAGACGAATGG | 4671 |
| hs132677878 | GGTTGGAGTACTTACAAGAACGG | 4672 |
| hs132679290 | ATGATGGCTGATATTTCCCATGG | 4673 |
| hs132683161 | AATGTGAGCCCATCAAAGGCAGG | 4674 |
| hs132678959 | AGTGGAGAAAAGTTCAGAGGGGG | 4675 |
| hs132680617 | AGAAGCATACAAAGTATACAAGG | 4676 |
| hs132681628 | GATTTGGCTTACAGGTTCAGGGG | 4677 |
| hs132681575 | TCCATAGTCAATGATGGCGATGG | 4678 |
| hs132677614 | AGCTTACGGCAAGGATGCAGGGG | 4679 |
| hs132679951 | TCTTCCGGAATACAATGTTGTGG | 4680 |
| hs132681208 | TAACATATACAATTTTACAAGGG | 4681 |
| hs132682576 | GAACAGAGATGTCATACAGATGG | 4682 |
| hs132683104 | AGCATGATAAGCATGATGTAGGG | 4683 |
| hs132679237 | ATAACTGCTTTGCCAATGTGAGG | 4684 |
| hs132681454 | TCTGTTCTCTGTTATAAAGGAGG | 4685 |
| hs132678961 | AAAGTGGAGAAAAGTTCAGAGGG | 4686 |
| hs132677467 | ATCATCACATTCAGGGGCAAGGG | 4687 |
| hs132678685 | ACAGAATGTGCCAAGCGTGTAGG | 4688 |
| hs132680506 | ATAAGGACTCTGAAATGCAAGGG | 4689 |
| hs132678273 | AATCAGGTAGGCAGGAAATGAGG | 4690 |
| hs132682252 | CATCAATCAGAAGTGGTGTAGGG | 4691 |
| hs132679614 | ATCACATGTCCAATATTACTGGG | 4692 |
| hs132681095 | CTCAAGAAGCAAACAAACCAAGG | 4693 |
| hs132679770 | TCTGAACTTCAAATACACTCTGG | 4694 |
| hs132680866 | CATCACACAATATATGGCCGTGG | 4695 |
| hs132678205 | AAAGAACCAAAAGGAACCCAAGG | 4696 |
| hs132678563 | CAGTTGAGACTACACCTTGGAGG | 4697 |
| hs132679218 | CAGAAGTGTCAAAGTTGAGAGGG | 4698 |
| hs132678859 | TAAGAGAAAATACAGTCTAGAGG | 4699 |
| hs132681837 | ACTACACAGAGAAAAGTTGTGGG | 4700 |
| hs132682437 | GTAGTAAGTACTGCTTTACATGG | 4701 |
| hs132678123 | CTGGCACTGTAGTTAAGAGATGG | 4702 |
| hs132677337 | GTTGGCCTCAAAGTAACAGAAGG | 4703 |
| hs132682415 | ACACTGCACTCAGTTGATAACGG | 4704 |
| hs132681964 | AAGGATACTTGGGAGCAGGTTGG | 4705 |
| hs132681354 | CACACCTCAGGAATGCCCACTGG | 4706 |
| hs132681267 | TAATGTATCCAAGACAACATTGG | 4707 |
| hs132682422 | ACTCCACTCCCTCTCTTGAAGGG | 4708 |
| hs132678722 | AAATTTGCTGTGATAAACAGTGG | 4709 |
| hs132678541 | GTAGATATTAAGGCCTGTGGGGG | 4710 |
| hs132678984 | TGTGGGTGGCAGTAAGGGAAGGG | 4711 |
| hs132680970 | AAATACACTTACTATCCTAAGGG | 4712 |
| hs132682976 | GAGTTCACATGCCAGTAAAGTGG | 4713 |
| hs132679634 | GTTAGAGAGAAATTATAGAGCGG | 4714 |
| hs132678004 | CCTGTGGTGATAAACAGCATTGG | 4715 |
| hs132683076 | GGAAAGGGATGAAGTTGTGAAGG | 4716 |
| hs132678253 | GTTCCCACTAGGAAATAGTAGGG | 4717 |
| hs132681682 | TTTAGAAATGGGATATCCTGGGG | 4718 |
| hs132680751 | ACCTGGACATTATGAAAGAGAGG | 4719 |
| hs132681200 | TTATTTCCTGGAACAGAACACGG | 4720 |
| hs132681813 | AAATAAGGAACTTTGTCCCAAGG | 4721 |
| hs132682398 | CATTTTGGAGATTCCATGTGTGG | 4722 |
| hs132681083 | TTTTATTTAATACTTTTGGGTGG | 4723 |
| hs132679652 | TACTGGGAGTCTCCGATAGTGGG | 4724 |
| hs132682007 | CAAGTAATATGGACAGCACAAGG | 4725 |
| hs132681642 | TAAACCTTGATTAAAAGCCAAGG | 4726 |
| hs132677508 | TTTTCCTTATGTGTCAGACGAGG | 4727 |
| hs132682568 | AACAACAAATATAAAAAAGGTGG | 4728 |
| hs132679492 | GCTACTGAATGTTTCATACCTGG | 4729 |
| hs132680283 | ATCTATCTCTTTAGGACCAGGGG | 4730 |
| hs132679478 | TTAACTATAATAGAGCCCTTCGG | 4731 |
| hs132677520 | CTTTGGGTGGTTAATCAAGTCGG | 4732 |
| hs132677836 | GTATCAAGGTCTCGATCGAGAGG | 4733 |
| hs132680502 | GGGGAAATAATACTTATCAAAGG | 4734 |
| hs132680785 | CTTGCCAGTTTTTTTCAGTGGGG | 4735 |
| hs132680685 | ATAACATTTCAAAATGCCCTGGG | 4736 |
| hs132677619 | GGTGGGTCTATCCAAGGCTGAGG | 4737 |
| hs132679122 | GGGAAGACTGGTATGTGTAAGGG | 4738 |
| hs132677997 | TTTATTAATGCCAGTGACTGCGG | 4739 |
| hs132679516 | TCTCTGTGTCTCTAACCTGAGGG | 4740 |
| hs132681725 | CATGTTTACAGGCATGGGAGAGG | 4741 |
| hs132677118 | TGTCTTTTGCCTGGAAACCAGGG | 4742 |
| hs132679136 | GAATTACAGCAGAGGAGGCGAGG | 4743 |
| hs132677510 | TTCCTTATGTGTCAGACGAGGGG | 4744 |
| hs132682010 | GGTACTAGAGTTAAAAGAAGAGG | 4745 |
| hs132677385 | GATTTCCATTAACGATGGTGTGG | 4746 |
| hs132681983 | AATTCCTCCTCCAAAAATCAGGG | 4747 |
| hs132677786 | ATCTAGATATGGCAGGCAGTAGG | 4748 |
| hs132677610 | TACAGTCTAAAATCAAGAGAAGG | 4749 |
| hs132679490 | GTTTCATACCTGGTATCATGTGG | 4750 |
| hs132679456 | GTTTCTTGCACTAAAAGATGAGG | 4751 |
| hs132678463 | TGGAGGATGAAGAATGACAAGGG | 4752 |
| hs132682434 | TGATTTGATCACAGTTCAGGTGG | 4753 |
| hs132679476 | GAAACAGTTTTCCTGCCGAAGGG | 4754 |
| hs132681798 | TAGGCAAGCTGCTACAAGGAAGG | 4755 |
| hs132677162 | TTTTGCTCCTGGCCAAAGGAGGG | 4756 |
| hs132682638 | AAAAAATGTTCAATCAAAGGTGG | 4757 |
| hs132682878 | ATATAATTCTAGGAATCCATAGG | 4758 |
| hs132682753 | TGAATAATAATGGGAAATGGAGG | 4759 |
| hs132682485 | TCTTGCTTCACTTTAATGTGAGG | 4760 |
| hs132682676 | ATGTACTTACATGATTATGTAGG | 4761 |
| hs132678736 | TCCCCTACTTTTCCTACTGTAGG | 4762 |
| hs132681458 | TTACATCCATGAAGCAGCAAGGG | 4763 |
| hs132680693 | AATGAGGATTCTCAGTTAAGGGG | 4764 |
| hs132678112 | CCTACCACGGGGGTATGCATGGG | 4765 |
| hs132678883 | CCTAGGGTATAATAGGAGGCAGG | 4766 |
| hs132678718 | CAAAGAGTAAATTACTGAGGAGG | 4767 |
| hs132678920 | TCTCCAGTGATACTTTAACATGG | 4768 |
| hs132681762 | CTCAGGACAAGTAGATAGGGAGG | 4769 |
| hs132678501 | TGCAGGATCTACCGGAAAGTAGG | 4770 |
| hs132677839 | AGTTCAAGAGTCGATGAAGAGGG | 4771 |
| hs132679623 | CATAACATGTTATAAAACATAGG | 4772 |
| hs132680355 | ACCTCCTATGTCCACCCCCACGG | 4773 |
| hs132681446 | TACATAGATCTTGTATCCCAGGG | 4774 |
| hs132679991 | GATACAAATAATGTAGCGAAGGG | 4775 |
| hs132677445 | TAGACAGACCCTTACAGGCATGG | 4776 |
| hs132677086 | AGATAGGTGATGAAAAAGCTGGG | 4777 |
| hs132681922 | AGATGTAGATGGGATCTCACTGG | 4778 |
| hs132681855 | GCAAGGCAGCTATATAGCAAAGG | 4779 |
| hs132678281 | CTATTACCATGAAATACACTAGG | 4780 |
| hs132679273 | CAAATTCTATGAGGTAGAGAGGG | 4781 |
| hs132678884 | CCCTAGGGGTGTAATCAAGAGGG | 4782 |
| hs132680151 | TAGTTTCCGTACTCCCCTAGTGG | 4783 |
| hs132683039 | TTTAGAATTCACTTACACAATGG | 4784 |
| hs132677741 | AGAGAAGGAGATTTACCTGATGG | 4785 |
| hs132677327 | ATACATTAGATTTATGCAGAGGG | 4786 |
| hs132677128 | GACAAGACCTGTAAATGCCCGGG | 4787 |
| hs132679794 | ACCCCCAGTAAGAGAGAAGGAGG | 4788 |
| hs132681493 | TTATGAACCTGTGTAATCATGGG | 4789 |
| hs132680732 | TCTCACTTCTTATTAACAGAGGG | 4790 |
| hs132683168 | GAACTGAGTGGGCTCAGTGTGGG | 4791 |
| hs132682121 | ATAGATACAAGTATATTGAAAGG | 4792 |
| hs132680505 | GAGTCCTTATCAGTATTCAAAGG | 4793 |
| hs132681731 | TTAGAATAATCAGGAACCAGTGG | 4794 |
| hs132680728 | TTCTTTCCCAAGGCCAAGAGGGG | 4795 |
| hs132682775 | AGCAAGAAGGTAACCAAAAGGGG | 4796 |
| hs132681321 | CAGGCAGAAGGCATTTCCAGAGG | 4797 |
| hs132679959 | GATCTTGTTACCTGAATCAGGGG | 4798 |
| hs132677823 | GCATCACTCAATACCATGGTAGG | 4799 |
| hs132677306 | AATTACAAATCCCTAGACATTGG | 4800 |
| hs132679457 | TTTCTTGCACTAAAAGATGAGGG | 4801 |
| hs132677577 | GGTGACAGTTTTAGTTCACAGGG | 4802 |
| hs132680910 | ATTCCATCAGAAAAAATGGTGGG | 4803 |
| hs132682268 | ATGTATACTTAGGTGTCTGTAGG | 4804 |
| hs132683237 | TACAAAATCAGACCCATAGAGGG | 4805 |
| hs132679065 | TCTGAACATGTGTAAAGCAAGGG | 4806 |
| hs132682321 | ACTTATTATTTTGTCATACACGG | 4807 |
| hs132679216 | TTTACTATATATATAAGTTGGGG | 4808 |
| hs132682841 | CTAGCGAGCTAAACCAAAGAGGG | 4809 |
| hs132677142 | GTGGCTGGATTCACAAAGCTGGG | 4810 |
| hs132679502 | CGAGATTCTTTCCTCTCAGGGGG | 4811 |
| hs132678771 | TCCAGAGGCACACACTGGAATGG | 4812 |
| hs132680762 | CCATATGCCTAGTCTAAGGTAGG | 4813 |
| hs132682012 | TTCAATCTTTTCCAAAGCCGAGG | 4814 |
| hs132677545 | ATACACACACTTTTTTTTGGGGG | 4815 |
| hs132678142 | TAAAAAATATCTTCTATCAGAGG | 4816 |
| hs132678935 | ATGTTTTTAGAAAACATCACAGG | 4817 |
| hs132677911 | GACAATGCTAGTTTTAGTAGGGG | 4818 |
| hs132682320 | TTCCATTGAAGACATTAAGACGG | 4819 |
| hs132680422 | TACATAGTCACTTTATAAGAGGG | 4820 |
| hs132683050 | TACCTTCTTGGCATCAAACAGGG | 4821 |
| hs132681465 | GGTTGACTGACAGTGGTCTAGGG | 4822 |
| hs132680897 | CTGAGAAAATCATCAGTCCAGGG | 4823 |
| hs132683248 | AAATATGGCCCTTAAACCCAAGG | 4824 |
| hs132680689 | AACAATGAAACATTTTACCCAGG | 4825 |
| hs132680942 | TGTTCTGCAGCAGGTTAAGTGGG | 4826 |
| hs132678990 | CTTTTATTTACTCTTGTGGGTGG | 4827 |
| hs132681379 | GAAAAGGGAGAGTGAGAACGAGG | 4828 |
| hs132679601 | TTTACTTTACCTCTGACAGTAGG | 4829 |
| hs132679771 | CATTTGTCTCAGAGCAATGATGG | 4830 |
| hs132681202 | TTCAGTTTGTGAATGTCATGTGG | 4831 |
| hs132681293 | CAACCTTCCCATATGTGTGGAGG | 4832 |
| hs132678662 | TTTGTCTAGTGACTGACAGAAGG | 4833 |
| hs132680060 | GATTTGAAGAAGAATATGGAGGG | 4834 |
| hs132679183 | GGTTTAATTTTGGATAAGTGGGG | 4835 |
| hs132681770 | ATCTGAGAGGACGACAGCTAGGG | 4836 |
| hs132679461 | AGCAGATCAGAGGCTTCAGTAGG | 4837 |
| hs132677737 | ATTTAAACTAATCTTAGTGGTGG | 4838 |
| hs132681174 | GGCATACAGGAATTTTTTGGGGG | 4839 |
| hs132679206 | GTAGGAAGTACATAAGACATAGG | 4840 |
| hs132681135 | CCACCAATTTAACTGTAACTCGG | 4841 |
| hs132677511 | TCCTTATGTGTCAGACGAGGGGG | 4842 |
| hs132682692 | ACATTATGTAAGACTAGCCCAGG | 4843 |
| hs132680514 | ACCCACCTATTCATTTCCCAAGG | 4844 |
| hs132679861 | AAGTACAGTTCTCTTTCTAACGG | 4845 |
| hs132680114 | TTTAAAGTTAATTTTATAGGGGG | 4846 |
| hs132679646 | TTGTCTTTCTGGAAATGAGGAGG | 4847 |
| hs132683106 | TCACATGATATTGCCCAAAGAGG | 4848 |
| hs132682919 | GCATCGTTTTGGAGTGTGCATGG | 4849 |
| hs132682994 | AGTCCTATGAGAAGCAGGCAGGG | 4850 |
| hs132681946 | GAAAAGTGAAGACATTTGAAGGG | 4851 |
| hs132679570 | TTACTTTATGTAGCTACTGAGGG | 4852 |
| hs132680589 | GTAGCAGAGGTAAATTGCCATGG | 4853 |
| hs132678882 | CACCCCTAGGGTATAATAGGAGG | 4854 |
| hs132682232 | AGTCCTGCTAGATCAGGCATAGG | 4855 |
| hs132679781 | TAGTGATAAATCGAATAAGTTGG | 4856 |
| hs132681124 | TTCCTAATTCTTGATCCAAGTGG | 4857 |
| hs132677407 | GCATTTGAGATAGCCAGTGATGG | 4858 |
| hs132679031 | CCTTTAAATGAAGATCACATTGG | 4859 |
| hs132683162 | CTAAAATGTGAGCCCATCAAAGG | 4860 |
| hs132680456 | TGAGTTGGTAAACAACCTTAAGG | 4861 |
| hs132680459 | TGGAGCCTAGACAGAGACATTGG | 4862 |
| hs132677290 | TAAAGTGAACCAAATCAAAGTGG | 4863 |
| hs132678846 | GCTAAGGCCTGGAAGCCTCAAGG | 4864 |
| hs132682770 | GCTCTTGTGGTTACAACAAGAGG | 4865 |
| hs132681987 | TCTACCCTGATTTTTGGAGGAGG | 4866 |
| hs132679459 | AAGAAACCCAGCAAGCTGAAAGG | 4867 |
| hs132681335 | AATATAACCTCAATTGCAAGAGG | 4868 |
| hs132681842 | TGCCAGTTCCCTGTGCTAAGAGG | 4869 |
| hs132680458 | AGGTTGTTTACCAACTCAGTAGG | 4870 |
| hs132677509 | TTTCCTTATGTGTCAGACGAGGG | 4871 |
| hs132678996 | GGGATTCTGAAGAAGTTCCTGGG | 4872 |
| hs132678184 | CCTAAACTTTGGTGTGCAGGAGG | 4873 |
| hs132677712 | CCATGGGGTAGGATGGTTCGAGG | 4874 |
| hs132679571 | CTTACTTTATGTAGCTACTGAGG | 4875 |
| hs132679276 | AGTTAATATCAAATTCTATGAGG | 4876 |
| hs132681076 | TACTTTTAGTGTCAACAAAGAGG | 4877 |
| hs132682582 | TTTCATGGAACAAAAAGTCACGG | 4878 |
| hs132679830 | CCAAAGGACTGAAACTTGAAAGG | 4879 |
| hs132682334 | TTAGGATTAGCTTATCCCAAAGG | 4880 |
| hs132682855 | AAAAATGTCTTCGATCTACAAGG | 4881 |
| hs132681491 | TGTGTAATCATGGGTAGTGTTGG | 4882 |
| hs132682659 | CAGCTAGTAATGTAAAATGGTGG | 4883 |
| hs132679284 | ACATTAATATCATCATCAAACGG | 4884 |
| hs132681276 | GAAGCACGAATATAAAACAAAGG | 4885 |
| hs132680872 | TAGGAATAAGTAATTCTGATGGG | 4886 |
| hs132682849 | CTGACTGACATAATAACTGCAGG | 4887 |
| hs132677673 | CTATCTCGTAAATAAGAGCTGGG | 4888 |
| hs132679208 | ATCATAGATTCTTTGCTAAGGGG | 4889 |
| hs132681796 | ATTATACACAGAAAAGCTGCAGG | 4890 |
| hs132677480 | ATTGTTATATCATTTGACATCGG | 4891 |
| hs132681556 | GTGTGTACATATATGGGTGGTGG | 4892 |
| hs132678103 | GCTTGGCTAGGGTTGTATTGGGG | 4893 |
| hs132677498 | AAGGAACTGGCACTTTTCAGTGG | 4894 |
| hs132681184 | TTCTGATGACCCTAGATCCAGGG | 4895 |
| hs132677386 | AACTTGATTTCCATTAACGATGG | 4896 |
| hs132678759 | CAGGAGCAGAGCCTTGAGATGGG | 4897 |
| hs132678937 | TTTATTTTCAGATAAAGCACAGG | 4898 |
| hs132682103 | AAAAAGCTAGTAAATGGAAGGGG | 4899 |
| hs132677819 | GATCCTTGCACAAACAAGCCAGG | 4900 |
| hs132682367 | TGGTTTTGTCTGGGAATCGGTGG | 4901 |
| hs132677236 | CTATAGAGTAAGTTGCAGGCAGG | 4902 |
| hs132681920 | AAATACTGAAAGATGTAGATGGG | 4903 |
| hs132677296 | CTTTTAACCTGAAAATCCAAAGG | 4904 |
| hs132680680 | ATTCAGTGTCAGGACAAAGATGG | 4905 |
| hs132680323 | AGTGTCTCCAGTGCCAGAGAGGG | 4906 |
| hs132679277 | TTGGTCTTGCAAAGGGTCAAGGG | 4907 |
| hs132681949 | CTAGGCTGAAGGATGATAGTGGG | 4908 |
| hs132677438 | GATGACTTCCCAGTAGGTGGAGG | 4909 |
| hs132681704 | ATAAAACTTGTTGAATCACTCGG | 4910 |
| hs132679905 | ATATTTTCTCACTCTTTCAGAGG | 4911 |
| hs132678020 | CAAAGTGGTAATTTGCCAGTAGG | 4912 |
| hs132679138 | AGAGGAGGCGAGGTAGAGGAAGG | 4913 |
| hs132681503 | CACTGCCTTTCAGTACCTACGGG | 4914 |
| hs132682311 | CCATTTTAGTGATTTCTGGAAGG | 4915 |
| hs132681035 | ATTGCTAGTCCCCACTTACAAGG | 4916 |
| hs132680441 | GGAAATTCAAGAAGGGATGACGG | 4917 |
| hs132679979 | ACAACTATGAAAAAGAGCATTGG | 4918 |
| hs132682668 | AGTGTCCTTACACTATTCGAAGG | 4919 |
| hs132677975 | ATGAAAAGAGTGGTGAGGTAGGG | 4920 |
| hs132679546 | TGTTTACTATCCCAAAGTTGGGG | 4921 |
| hs132677357 | CCATATCAGAAAATAAATGAAGG | 4922 |
| hs132683225 | AATAAATAAAAAGTAAACCTAGG | 4923 |
| hs132682671 | GTTAAAATCAGTCACTTCAGAGG | 4924 |
| hs132678505 | CTGCATGTAGATCCTTATGTGGG | 4925 |
| hs132681028 | TTCATCACTATCATAGAGATGGG | 4926 |
| hs132682098 | TGCTTGTGTAATTAACTCCATGG | 4927 |
| hs132677805 | CATTATTCAGATCATTGCAAAGG | 4928 |
| hs132680752 | TGTCCAGGTGAAAGAAATGCCGG | 4929 |
| hs132682418 | AATCTCTTTCCCTTCAAGAGAGG | 4930 |
| hs132682620 | CCAATTATAGCTATCTAGCTCGG | 4931 |
| hs132678197 | TGCTTGTGATCAAGAATGGATGG | 4932 |
| hs132677987 | TTCTGGCTGTGAGAGGCATAGGG | 4933 |
| hs132681764 | GATTTTGTTTAGAAGTAGCAAGG | 4934 |
| hs132679667 | TTTGGTAGAGATAGGCAGTAGGG | 4935 |
| hs132681347 | GAAAATGTGTTACAGTAAGGAGG | 4936 |
| hs132680059 | TGATTTGAAGAAGAATATGGAGG | 4937 |
| hs132679378 | TGCAAAAGTAAAGAAAAAGTGGG | 4938 |
| hs132679421 | CTTAAAATATTGAAATAGCGAGG | 4939 |
| hs132679677 | GCTAAAATATATGTGACTGTAGG | 4940 |
| hs132679742 | GTTTCCTTAAAGCCCTCTGAGGG | 4941 |
| hs132677713 | GTGTGATCCATGGGGTAGGATGG | 4942 |
| hs132681622 | AGAGGTTTGAGATTCACAAAAGG | 4943 |
| hs132678348 | CGTAATTGTTTCCCTTGAGGGGG | 4944 |
| hs132680439 | CAGTGTTAGGAAATTCAAGAAGG | 4945 |
| hs132679417 | TCTTCATCAACAGTTTGGAAAGG | 4946 |
| hs132677693 | TGTCACCACCAACGATGACTGGG | 4947 |
| hs132678263 | TACCACCCAGGGAATACAGCAGG | 4948 |
| hs132680127 | TTGTTACTAGAACTAAAATGAGG | 4949 |
| hs132680063 | TCAAATCAAAAAACGTAGAACGG | 4950 |
| hs132678311 | ATAAAGACAATATTTCCTATGGG | 4951 |
| hs132679356 | CAATCTAGATAGTATTTCCGTGG | 4952 |
| hs132683233 | TTTGAGATTGGATCTCCTAGTGG | 4953 |
| hs132678700 | CATGTATCATTAGGGAGTAGAGG | 4954 |
| hs132682200 | AAACAATCTAAAACTTGCAATGG | 4955 |
| hs132677250 | CTAAAACTGGTGAATGCAGATGG | 4956 |
| hs132679695 | GGACTTCTAACTTAAGACAATGG | 4957 |
| hs132680921 | TTTTAGGAACTTCTGGGCTGGGG | 4958 |
| hs132679899 | GTAATCCACTGAAGGAACTCAGG | 4959 |
| hs132677100 | ATTACATAGAAGCATTAGAAAGG | 4960 |
| hs132680507 | GATAAGGACTCTGAAATGCAAGG | 4961 |
| hs132677646 | TCCCCATACTTAAGATCAAGTGG | 4962 |
| hs132681781 | AGATGTTTATTTTAGGACTGTGG | 4963 |
| hs132680347 | CATTAAATGTAAATAATCCGTGG | 4964 |
| hs132679733 | CACCAAATACAGGCAGTCACAGG | 4965 |
| hs132680124 | TATAAAGGAAATGGGTTCAGTGG | 4966 |
| hs132681786 | TCTAAAGAAGATGGATCACCAGG | 4967 |
| hs132679537 | TTGGATTTCATGCCATGGCAAGG | 4968 |
| hs132679591 | GTTCTATTTTGGAGAGAAGGAGG | 4969 |
| hs132677350 | TATGGCCATATAAATTTCAAAGG | 4970 |
| hs132677830 | CTAAGCTCCCTCTGGAATGGAGG | 4971 |
| hs132681840 | AAGAACTCTTGGGCCAGTGTAGG | 4972 |
| hs132681074 | ATAGGTTTGGTGGACAAACTAGG | 4973 |
| hs132681471 | TAGACAGAGGTTTCCCTCCACGG | 4974 |
| hs132681574 | TGTTACTCCATAGTCAATGATGG | 4975 |
| hs132681861 | GCATGAGCTTCATACTCACTTGG | 4976 |
| hs132678517 | GTTTCTGAACTAGCAGTGCCCGG | 4977 |
| hs132680215 | GGAGATGGTTTTGAGTACTCAGG | 4978 |
| hs132681313 | TCTTACACTAGTACCCTTCAGGG | 4979 |
| hs132681410 | TGCTACAGAAGTATAAATGATGG | 4980 |
| hs132681916 | AATACCTTCCGTCATTCCAATGG | 4981 |
| hs132682711 | CCTACTGTTAAGACACAGGATGG | 4982 |
| hs132680525 | AATTCTACAGTAACTGGGGTTGG | 4983 |
| hs132679729 | ATGATTAGAATAGGGAACCTAGG | 4984 |
| hs132678757 | CTTAACACCCCGTTGACCAAAGG | 4985 |
| hs132682001 | GATATTTGAAACAACAAGCAAGG | 4986 |
| hs132681495 | ATTGTAACCTAAACTGCCTGTGG | 4987 |
| hs132677163 | ATTTTGCTCCTGGCCAAAGGAGG | 4988 |
| hs132678470 | GGCCCTTTCATATCTCTGTACGG | 4989 |
| hs132682891 | ATTGCAGTGAAAGAAATTTGCGG | 4990 |
| hs132679321 | AGGTGTGATCTAACCAGCATAGG | 4991 |
| hs132681450 | TTATTACAAGTCACTCTTTGGGG | 4992 |
| hs132679679 | TGACTGTAGGAATCCTCTGTTGG | 4993 |
| hs132678879 | TCCCTCTTGATTACACCCCTAGG | 4994 |
| hs132679360 | GTATTTCCGTGGGGGTAATGAGG | 4995 |
| hs132680917 | GCTGGGGAAATGTGGCCTGAAGG | 4996 |
| hs132678151 | TTCTTACAGCTCCTTCACATTGG | 4997 |
| hs132680997 | GCTTACTTTAGAGCAGTCACAGG | 4998 |
| hs132678059 | CTATATGCAGAATCGTGTATGGG | 4999 |
| hs132679480 | TTTGATGTTATGTACTTAGGAGG | 5000 |
| hs132683259 | ATTAGGAATGCAATATATGGAGG | 5001 |
| hs132681001 | TGTCCCTGATGCTGGAAAAGTGG | 5002 |
| hs132679053 | AATTTGTGTTTCAAAAAACTGGG | 5003 |
| hs132680576 | GAATAGGATGGTTTGTAAAGGGG | 5004 |
| hs132679155 | TGAAGATCTAAAGTGAAGCCAGG | 5005 |
| hs132677755 | CTGTAGGTCCTCAGGACACATGG | 5006 |
| hs132677708 | GCATGAACTGGCCATGAACATGG | 5007 |
| hs132677601 | AAGAGGTAGGTCATTCAGCCAGG | 5008 |
| hs132682853 | TCTTCGATCTACAAGGTCTACGG | 5009 |
| hs132681246 | TCTTATGCCTAGATGTACATAGG | 5010 |
| hs132678536 | GGAAAGGCCAGTCTATTGACAGG | 5011 |
| hs132681052 | TTATTGTTTGCTCCATACAAAGG | 5012 |
| hs132680918 | CAGAAGTTCCTAAAATCTTGTGG | 5013 |
| hs132681077 | ACTTTTAGTGTCAACAAAGAGGG | 5014 |
| hs132683094 | TTATATGTTTTGTTACAAGTAGG | 5015 |
| hs132679715 | GTGAAAAGTAATACTTCCTAGGG | 5016 |
| hs132679141 | GGGCATTTTGTGCAATGCTGAGG | 5017 |
| hs132681683 | ATAAACGTATTTTTCCCTTGAGG | 5018 |
| hs132682284 | CATGTAGTCTCTAAAGGCACAGG | 5019 |
| hs132677456 | TGCGAGTTACACACATCGACTGG | 5020 |
| hs132677502 | CAACTACACCGAATCTCACATGG | 5021 |
| hs132680991 | ACACCCCATCAACAATAAAGTGG | 5022 |
| hs132680847 | CAGTAGTTGTGGCAACCTATGGG | 5023 |
| hs132679772 | ATAAATGCAGTAAAAAGCCTAGG | 5024 |
| hs132678864 | GTGATCATTCATTTAAACCTCGG | 5025 |
| hs132678147 | CATCTTTGAAAAATTCAAGAGGG | 5026 |
| hs132681735 | TTCTTCCTGATTACATCCAGTGG | 5027 |
| hs132680443 | ATGGATTTGAAAGGACAAGAGGG | 5028 |
| hs132680932 | TCTAGACATATAATTTTAAGGGG | 5029 |
| hs132679188 | TTTCCATTTGAATATCCCACAGG | 5030 |
| hs132678896 | CTAAAAGACACACTACTGATGGG | 5031 |
| hs132677621 | ATTGCAGGTTGGAGGAGGGTGGG | 5032 |
| hs132682526 | TGCCTTTTCCAGGTTTTCTGAGG | 5033 |
| hs132677038 | AATTAATCTGCCGAAGATGACGG | 5034 |
| hs132678770 | GGCACACACTGGAATGGCACCGG | 5035 |
| hs132681025 | ACTGGAAGAGATATACAAGATGG | 5036 |
| hs132678137 | TTTAAAATATTCTGTAGCCAAGG | 5037 |
| hs132680928 | TTGCTCGGACAGAGTCTGTAGGG | 5038 |
| hs132678066 | GACTGGGGATACAATGTGGATGG | 5039 |
| hs132678692 | AAGTCTCCCACACATGATGCAGG | 5040 |
| hs132677408 | ATAGCCAGTGATGGAAATGAAGG | 5041 |
| hs132679160 | TAGTAAGGATGGATAAGGAGTGG | 5042 |
| hs132681330 | TATTAGACACAAAAATTGGAAGG | 5043 |
| hs132681302 | CCTCCAAGCATATCAAGTACAGG | 5044 |
| hs132682075 | GGAATTTTCTTTAGCTGGCAGGG | 5045 |
| hs132682838 | TATTTTCAATGATTTTCCATGGG | 5046 |
| hs132678638 | CAAACTATGACGCGAGAGGATGG | 5047 |
| hs132680455 | GTAGGTAGTATGTTATCCTCAGG | 5048 |
| hs132681322 | TGACGCTTCTTGCAGGCAGAAGG | 5049 |
| hs132682439 | GTTTACTGAAAGGCATACCTAGG | 5050 |
| hs132678880 | CCCTCTTGATTACACCCCTAGGG | 5051 |
| hs132679211 | CCAGTTACCATAAAAAGACATGG | 5052 |
| hs132679897 | TTTTACCTGAGTTCCTTCAGTGG | 5053 |
| hs132681147 | TAGAGATATAATAAGTGGAAGGG | 5054 |
| hs132678833 | TCAGACACTCCCATTCCAATGGG | 5055 |
| hs132678071 | TGAAAAGGATGCGGGAAAGGTGG | 5056 |
| hs132680676 | AATTAGAATTGTCTTTCAGAGGG | 5057 |
| hs132677825 | CTCAATACCATGGTAGGAGGAGG | 5058 |
| hs132678119 | CATCTCTTAACTACAGTGCCAGG | 5059 |
| hs132678422 | GCCACCACAACAGAGAAGGTTGG | 5060 |
| hs132683148 | TTATTTTGTAAAGCTACGGAAGG | 5061 |
| hs132681507 | GTTTCCTGAACCAGGAACATAGG | 5062 |
| hs132683210 | AACAATATATAAATAGAGGATGG | 5063 |
| hs132682280 | TTCTACCCTGCTACTTGTAGAGG | 5064 |
| hs132680735 | ACCTGATTTATTCAAAGAGGAGG | 5065 |
| hs132682196 | ATTAAAATAACCAATCCTCTAGG | 5066 |
| hs132680849 | GCAACCTATGGGATTAAGTAGGG | 5067 |
| hs132678878 | TCATAGCATACCAATTAAGCAGG | 5068 |
| hs132680004 | TTATAGGAAGAAAGTTATGAAGG | 5069 |
| hs132678832 | GTCAGACACTCCCATTCCAATGG | 5070 |
| hs132677115 | CAAAGTTTATATGTGATCCAAGG | 5071 |
| hs132680374 | ACAGCCCACTCCTAGCCCATGGG | 5072 |
| hs132683145 | CGTAGCTTTACAAAATAACAAGG | 5073 |
| hs132678465 | GACCGTACAGAGATATGAAAGGG | 5074 |
| hs132682246 | GGACTGCAAAGCACTCAAGCAGG | 5075 |
| hs132677615 | AAGCTTACGGCAAGGATGCAGGG | 5076 |
| hs132681101 | ATATTGTGATTTAAGGGCGTAGG | 5077 |
| hs132678741 | CCAATAAATCAACCTACAGTAGG | 5078 |
| hs132679629 | TTTTCAACTGGTAGTTGGGGAGG | 5079 |
| hs132678328 | AGCCTACTAAAGAGAATGAAAGG | 5080 |
| hs132682599 | TATTGCCACGGAAGAAGGCTGGG | 5081 |
| hs132681136 | CGAGTTACAGTTAAATTGGTGGG | 5082 |
| hs132678730 | CAATATTTAAGAAAAAACTTAGG | 5083 |
| hs132678278 | TAACAACAATTAGTTAAAAGCGG | 5084 |
| hs132677365 | TCACCAGAGATAGAAATATGAGG | 5085 |
| hs132683132 | TAACATATCAATAAATTACATGG | 5086 |
| hs132679094 | TATTAATCCATCCCTGGCATAGG | 5087 |
| hs132677035 | ATAGCTTTAGTTTTCAAAAGGGG | 5088 |
| hs132681275 | AAGCACGAATATAAAACAAAGGG | 5089 |
| hs132679682 | CACCAACTTATCTATTGCAAGGG | 5090 |
| hs132680284 | CATCTATCTCTTTAGGACCAGGG | 5091 |
| hs132679799 | TCCTCCTTCTCTCTTACTGGGGG | 5092 |
| hs132680348 | ATTAAATGTAAATAATCCGTGGG | 5093 |
| hs132678005 | GTGGTGATAAACAGCATTGGAGG | 5094 |
| hs132678275 | GCTGTTGAGTGACAGTTAAGTGG | 5095 |
| hs132678473 | CCAAGGAACAAGGTCCCTATGGG | 5096 |
| hs132677687 | GACTGGATCCCAGTCATCGTTGG | 5097 |
| hs132677734 | CATTTTAAAACTCTTAGTGGTGG | 5098 |
| hs132679768 | TGATAGATAAATGTAAAGCTGGG | 5099 |
| hs132678354 | GTCTAGATTTGGAGAGACAAGGG | 5100 |
| hs132680950 | AGTAGAAAAATTCTTCCCATGGG | 5101 |
| hs132681522 | AGGGTACTCTTTAAATCTAGTGG | 5102 |
| hs132679292 | GAAGACTACAAGCCATATGATGG | 5103 |
| hs132681372 | TATTTTTCATCTTTATGCGATGG | 5104 |
| hs132681655 | TGGTGAACTCTGGTCTTCCATGG | 5105 |
| hs132681383 | AGTGAGAACGAGGATGAGGGAGG | 5106 |
| hs132681474 | GTAGCTGATAGAGGTGAGAAAGG | 5107 |
| hs132679540 | AGATGGATTTTACCTTGCCATGG | 5108 |
| hs132681598 | ACTTGGTCACACTATATAAGTGG | 5109 |
| hs132677843 | AATCTGTTAAATAGAAACATAGG | 5110 |
| hs132678723 | AATTTGCTGTGATAAACAGTGGG | 5111 |
| hs132681719 | AAAGTAAACTTAAAATTAGGAGG | 5112 |
| hs132680850 | TGGACCCTACTTAATCCCATAGG | 5113 |
| hs132679699 | AGAGCAGTGTGTAAAAGGATTGG | 5114 |
| hs132678376 | TGTCCTTATAGCTTCTTGGTGGG | 5115 |
| hs132679152 | AAATCAGTCTAAATACTGCCAGG | 5116 |
| hs132679162 | GGATGGATAAGGAGTGGGAGTGG | 5117 |
| hs132680409 | GCCTAGTCCCAATTTCTGGTGGG | 5118 |
| hs132682840 | GTTTAGCTCGCTAGCTAACAGGG | 5119 |
| hs132681966 | TTGTACTATGAAGGATACTTGGG | 5120 |
| hs132677883 | TACAGAATAAGAAAGCACTAGGG | 5121 |
| hs132680543 | CCACAATTAAGAAAAGATGATGG | 5122 |
| hs132681872 | AGTTACAATGAGTTCTTCAAGGG | 5123 |
| hs132681504 | GCACTGCCTTTCAGTACCTACGG | 5124 |
| hs132682293 | TACTAGATATTACTCACTCAGGG | 5125 |
| hs132677762 | CTGCTTTGCTCAAATGTCAGGGG | 5126 |
| hs132681467 | AGTTTGAGCTGCAGCACCCGTGG | 5127 |
| hs132680758 | TAGCACAGATACAATTAAGCAGG | 5128 |
| hs132677364 | AGAGATAGAAATATGAGGCATGG | 5129 |
| hs132679550 | TCCCAAAGTTGGGGGGACATGGG | 5130 |
| hs132682239 | GCTGAAGCTGACGCTGACACGGG | 5131 |
| hs132680641 | AAAAAAATGTCAACGAAGCAGGG | 5132 |
| hs132679494 | TTTGACAACGTGTCTCAAGAAGG | 5133 |
| hs132677605 | TTTAAATTTAAGGTTCAAAGAGG | 5134 |
| hs132682721 | TCCCTGCCAGAACAAGCAAAAGG | 5135 |
| hs132677812 | TCTTGGCAGGAAACAATTGATGG | 5136 |
| hs132680399 | TTCCTTTATCCAGTTATCTGAGG | 5137 |
| hs132683058 | TCAGAACTAAAGTTTTTGAAGGG | 5138 |
| hs132679309 | TGACATCTGAATCTATGAAAGGG | 5139 |
| hs132678304 | ATGCTCTTGCCAGATTTGTAGGG | 5140 |
| hs132682113 | TTAAAAGGTACCTACCCATAGGG | 5141 |
| hs132681936 | TCTCATATAGAAGCTATTGTGGG | 5142 |
| hs132681962 | TGGGAGCAGGTTGGAGAAGAGGG | 5143 |
| hs132679990 | GTATCTCTACTTCGTCTACTGGG | 5144 |
| hs132679032 | TTAAATGAAGATCACATTGGAGG | 5145 |
| hs132682703 | TATCCTGTCACATTACACTTAGG | 5146 |
| hs132681549 | CCTGTCAGTATTGACCCCTTGGG | 5147 |
| hs132678202 | ATACAGATTAAAGAACCAAAAGG | 5148 |
| hs132677260 | GGTGTATGTTGAAGATGAAAGGG | 5149 |
| hs132678076 | ATATCCCAAAACCTCCATTACGG | 5150 |
| hs132680191 | ATTGATGTACAAGCCCGAAAAGG | 5151 |
| hs132677058 | TGACTGGTATATTCCAAGAATGG | 5152 |
| hs132680363 | AGGATATGCCCCTTTATGATGGG | 5153 |
| hs132681092 | GGCTTGGTTTGTGGTCAAGATGG | 5154 |
| hs132680933 | TGTCTAGAAAAGCTTTTGCTCGG | 5155 |
| hs132681148 | TTAGAGATATAATAAGTGGAAGG | 5156 |
| hs132678012 | GTTGTCTAACCTTTTGGCAAGGG | 5157 |
| hs132677517 | ATCAAGTCGGTACACTCGGATGG | 5158 |
| hs132680998 | ACTGCTCTAAAGTAAGCTAAAGG | 5159 |
| hs132678013 | GGTTGTCTAACCTTTTGGCAAGG | 5160 |
| hs132679344 | TTAGTACCATAGTTATACTCAGG | 5161 |
| hs132678513 | TCATCTTGAGACAAGAGCTCAGG | 5162 |
| hs132677294 | CATTTGTGAAGGTGTTTAAGTGG | 5163 |
| hs132678181 | TATTATGTGTATAGTATGGATGG | 5164 |
| hs132678641 | GCCACGTGACACAGAAATGAAGG | 5165 |
| hs132677657 | TCCCACTTGATCTTAAGTATGGG | 5166 |
| hs132677462 | AGCAGTTGCAAAGTAAAGAATGG | 5167 |
| hs132678044 | TGCCATGGCTGTTTGTTAGAGGG | 5168 |
| hs132679757 | ATCTAGTGTTTGATTGAGGACGG | 5169 |
| hs132678074 | GCAAAAAATTGAAAAGGATGCGG | 5170 |
| hs132679374 | ATTCAATCAGTAGATAAGCTTGG | 5171 |
| hs132678084 | GTAGTTTGACATGACCGTAATGG | 5172 |
| hs132682604 | CTTGGCCTATCTCAGGGTACAGG | 5173 |
| hs132681102 | TATTGTGATTTAAGGGCGTAGGG | 5174 |
| hs132677363 | GAGATAGAAATATGAGGCATGGG | 5175 |
| hs132677749 | AATTGCATAGCAATCAAAAAGGG | 5176 |
| hs132680790 | GAAAAGAACAGAATGTCCTTGGG | 5177 |
| hs132680262 | TTTAGCTCTGTGCTAATGAAAGG | 5178 |
| hs132680149 | TCAAATATGGTCCTGCACACAGG | 5179 |
| hs132677169 | CAGACTTCAACTTTCTACCCTGG | 5180 |
| hs132677193 | AGAAGACTTATAAAAGACCTTGG | 5181 |
| hs132681071 | CTAGGAACTGGAGAATATATGGG | 5182 |
| hs132679178 | TAAGAAGAGGTGTAGTAGAGAGG | 5183 |
| hs132681854 | CAAGGCAGCTATATAGCAAAGGG | 5184 |
| hs132682182 | TTCTAGATCAGCTTTAACAATGG | 5185 |
| hs132681291 | ACACACACCTCCACACATATGGG | 5186 |
| hs132678660 | TGAAACTGTAACAGTTGTAAGGG | 5187 |
| hs132681652 | AAAGTTTGTCTAGGATGCCATGG | 5188 |
| hs132677258 | CACCATGTCTTTGTTGCAGGTGG | 5189 |
| hs132680873 | ATAGGAATAAGTAATTCTGATGG | 5190 |
| hs132679477 | CTATAATAGAGCCCTTCGGCAGG | 5191 |
| hs132680356 | ATTAGACGAGCAAAAGGAAGAGG | 5192 |
| hs132679095 | GGATACTCCTATGCCAGGGATGG | 5193 |
| hs132683109 | TGAGTCCTGGATTTTTAATGTGG | 5194 |
| hs132679650 | TCTTTGTCAGTTCCCACTATCGG | 5195 |
| hs132679782 | GATAAATCGAATAAGTTGGTAGG | 5196 |
| hs132677490 | TCTAATGTATTTGAAAAATGTGG | 5197 |
| hs132679582 | CAGAATAGCCCAGTCAAAAGAGG | 5198 |
| hs132682653 | AAGTAATTAAAATCTGAATGTGG | 5199 |
| hs132682430 | CATGTTAAATTAAGGTTTAGGGG | 5200 |
| hs132677287 | GTTCAAAAAGAAACACAGATAGG | 5201 |
| hs132677788 | TCTAGAATCTAAATAAGGCTAGG | 5202 |
| hs132682952 | ATATGCAAGCTAAATATGCTTGG | 5203 |
| hs132678196 | AATATGCTTGTGATCAAGAATGG | 5204 |
| hs132678619 | CTGACAACTCCAAGGCTGGATGG | 5205 |
| hs132681785 | CGACTTGGTTCTAAAGAAGATGG | 5206 |
| hs132683074 | GCTTCCTCAAACACAGGGAAAGG | 5207 |
| hs132679220 | GTAGGCCAAGCCAAATCAATCGG | 5208 |
| hs132679968 | AGTTACAGTCCAGTTACTTGAGG | 5209 |
| hs132681364 | GGGTCAACCAAAGTGTATAAAGG | 5210 |
| hs132678206 | GGAACCCAAGGAAATCAGAAAGG | 5211 |
| hs132683112 | TAATGTGGACATATATGTTGCGG | 5212 |
| hs132682713 | CCATCCTGTGTCTTAACAGTAGG | 5213 |
| hs132680906 | CTCACAGTAGTTTTACCCCATGG | 5214 |
| hs132679935 | AACATTATTACCAAAACCATCGG | 5215 |
| hs132681819 | AGTTATAGCTGACCTTTACTGGG | 5216 |
| hs132678567 | CCAAAAGAAACACATTTCAATGG | 5217 |
| hs132682819 | CATTTAGTAACAATAAATGTTGG | 5218 |
| hs132681159 | ATAAGATTACCTTTCTGGTAGGG | 5219 |
| hs132680020 | TACAGAATCTAAAGATTGAAGGG | 5220 |
| hs132682235 | GTAAAGCTAGACGGATCAAAAGG | 5221 |
| hs132678217 | GTATAAATCCTGATACTAGCTGG | 5222 |
| hs132679124 | AATTGCAATGAAATGTATGTAGG | 5223 |
| hs132677920 | GCACAGATTAGTGTCACCTATGG | 5224 |
| hs132682790 | TTTTAGCACACCTGGTGCAGAGG | 5225 |
| hs132681041 | GCCCAAATCATCAAAGCAGATGG | 5226 |
| hs132682056 | TACTTGGAATGGATGAGCAAAGG | 5227 |
| hs132682984 | TGGGGTTACTAAACATTCAAAGG | 5228 |
| hs132680162 | AAAATCCACCCACCCCACTAGGG | 5229 |
| hs132677222 | ACCACATCAGACCGTGGGAACGG | 5230 |
| hs132680553 | ATTAGACCTCTATTTGTGCTAGG | 5231 |
| hs132681420 | TTAGATCTAATTTGTATAGGGGG | 5232 |
| hs132680815 | CCATTGTGTTTCCCATCCCAAGG | 5233 |
| hs132681068 | AAGTATCTCTCATAGGTCCTTGG | 5234 |
| hs132678492 | GTTTTGTCTTAAATTTCTGGAGG | 5235 |
| hs132681952 | TTACTGACGCGTCCCCCAAACGG | 5236 |
| hs132677297 | TTTTAACCTGAAAATCCAAAGGG | 5237 |
| hs132679848 | TGCTGTTCTCCCCAAAGCAGGGG | 5238 |
| hs132679146 | TTTTTATAATAAAAGCTGTAGGG | 5239 |
| hs132677384 | TCAAGTTGTTATATGTAAGTGGG | 5240 |
| hs132677623 | AAAGATTGCAGGTTGGAGGAGGG | 5241 |
| hs132679628 | GCTTTTTCAACTGGTAGTTGGGG | 5242 |
| hs132680664 | CTTGCTTAAGGAAAACTGGATGG | 5243 |
| hs132678887 | CTGCCTCCTATTATACCCTAGGG | 5244 |
| hs132678708 | CAGACAACTGAGTAACCAAATGG | 5245 |
| hs132678558 | TTTATGATGGATTAAGGGTGTGG | 5246 |
| hs132682743 | CAATGTCTGTGAATTGCCCAGGG | 5247 |
| hs132678111 | GGGGTATGCATGGGAGCAGAAGG | 5248 |
| hs132681640 | AATGTAATTTTTGCTAAGTGCGG | 5249 |
| hs132681222 | TTATTTCCTGCATTAGTCAAGGG | 5250 |
| hs132677846 | CTAAGAAGAGACTGAGTGCTGGG | 5251 |
| hs132681799 | AATCTAGGCAAGCTGCTACAAGG | 5252 |
| hs132677426 | ATAATTTCTCAATTACCCTACGG | 5253 |
| hs132680113 | ATTTAAAGTTAATTTTATAGGGG | 5254 |
| hs132680823 | GAGCCCAGAACATCTCTTTGTGG | 5255 |
| hs132679131 | AGGTAGGGTGGGGAAAAAGTGGG | 5256 |
| hs132680047 | AACATTTACCCATAACGTAAAGG | 5257 |
| hs132681486 | CATGTGCATTTGCAAGACCTTGG | 5258 |
| hs132677518 | TTAACCACCCAAAGCTGCTTAGG | 5259 |
| hs132678758 | ACAGGAGCAGAGCCTTGAGATGG | 5260 |
| hs132678481 | CAGTGCCAGGATTTGAAGGCGGG | 5261 |
| hs132677681 | ACTTAGTCTCAGAGTGGGAGTGG | 5262 |
| hs132682033 | ATATTAGTGTGAATGTATGTGGG | 5263 |
| hs132681430 | ATCATCTTGCAGATACAGACAGG | 5264 |
| hs132680503 | CAAGTAATCTGGACTATCACAGG | 5265 |
| hs132679127 | TGAAATGTATGTAGGTAGGGTGG | 5266 |
| hs132680199 | GTATCTGACTACCAGTTTCAGGG | 5267 |
| hs132677888 | GCCTTGAAGAAAGGTGTTGGTGG | 5268 |
| hs132678057 | ATCGTGTATGGGGAGAGTACAGG | 5269 |
| hs132681349 | TTGACAACTTACTTATTGTGTGG | 5270 |
| hs132681024 | ACATAATGCAAAATGAGCACTGG | 5271 |
| hs132683126 | TTCCCTTTATTAAGCCGGCATGG | 5272 |
| hs132680183 | GGGTGAAGAAAGGAGAGTCGTGG | 5273 |
| hs132679157 | GTGAAGCCAGGTAGTAAGGATGG | 5274 |
| hs132679125 | GCAATGAAATGTATGTAGGTAGG | 5275 |
| hs132680536 | TGAGAATCTATATTCTACATAGG | 5276 |
| hs132678458 | AGTGCTCAATGGGTTTTTGGAGG | 5277 |
| hs132680586 | TCAAATTCAAATAACGACATAGG | 5278 |
| hs132677401 | CAGAATGTTCAATTTTATAGGGG | 5279 |
| hs132677106 | AATACTTTCCAAAAAACGTCAGG | 5280 |
| hs132680152 | AGTTTCCGTACTCCCCTAGTGGG | 5281 |
| hs132678626 | GGCTGGGGAAGAATGATTTGAGG | 5282 |
| hs132677858 | AAGGTTATAGCAGTGTAGGCTGG | 5283 |
| hs132680612 | TGAGAGACTTAAAATTAGGTAGG | 5284 |
| hs132679133 | GGGAAAAAGTGGGAGAAGAAGGG | 5285 |
| hs132677946 | ACCACAGGGCTCTTGGACAAGGG | 5286 |
| hs132680523 | TAGTGATGCCCAATGAGCCTTGG | 5287 |
| hs132679595 | GATGTTTATATTCTGACGAAGGG | 5288 |
| hs132680888 | AGCTAGAAGGTAACTTTAGGAGG | 5289 |
| hs132682483 | GCTTTTAGATAGTAACAAGATGG | 5290 |
| hs132683186 | TATCTTTTGGTTTCACCAAGTGG | 5291 |
| hs132677228 | CCCTGTAGTATGAATACCCCAGG | 5292 |
| hs132678921 | CTCCAGTGATACTTTAACATGGG | 5293 |
| hs132680436 | GTGAGGCCAGTTTGCTAAAGGGG | 5294 |
| hs132678839 | TGTTGAAAACTATGTCCCATTGG | 5295 |
| hs132681869 | ATCAGTGGAAAGCACTTGAATGG | 5296 |
| hs132678642 | CACGTGGCTATACTGTTCATTGG | 5297 |
| hs132679703 | AGATAGAATTGAGAAGACTATGG | 5298 |
| hs132678529 | TAAAGGACTCAAACTTTTCGCGG | 5299 |
| hs132682540 | TAAATGGGAGCTTTGCCAAAGGG | 5300 |
| hs132682145 | TCAACATAATAGGACAGCCCAGG | 5301 |
| hs132682048 | AGTTTATCTTTCCAGTAAGAGGG | 5302 |
| hs132678414 | TTACATTCTCCATCCAGTCCAGG | 5303 |
| hs132679275 | CTTTCTGCTAACTTTTTGAAAGG | 5304 |
| hs132678773 | CTTTGATGTGTCACGTCCAGAGG | 5305 |
| hs132677059 | GGATGTCGAACCACTCTGACTGG | 5306 |
| hs132680100 | ACTGTATTCTGTAATTGCTAGGG | 5307 |
| hs132680285 | GCATCTATCTCTTTAGGACCAGG | 5308 |
| hs132682192 | AATTTCATCCTATTCTGTATGGG | 5309 |
| hs132678750 | GATATGCCATCCTATTAAGTAGG | 5310 |
| hs132678478 | TCATGTACAATTCATCCCATAGG | 5311 |
| hs132682081 | TGGTAATGTGTTTATAAGAGAGG | 5312 |
| hs132677717 | AATTCACTGTGTGTGATCCATGG | 5313 |
| hs132682022 | CTGAAATGTCTCTCTAGCACTGG | 5314 |
| hs132681472 | ATCATTAGCGTAGCTGATAGAGG | 5315 |
| hs132681775 | TCGTCCTCTCAGATGCCAAAAGG | 5316 |
| hs132678945 | CCCTCCTACCTAAAACTATGAGG | 5317 |
| hs132681271 | GCACACTCTTTATGGTGAAAGGG | 5318 |
| hs132677147 | GATCCATTTTCAAATTCCATGGG | 5319 |
| hs132679902 | AATTAACTTCAATAGGGCTGTGG | 5320 |
| hs132683075 | CTTCCTCAAACACAGGGAAAGGG | 5321 |
| hs132678347 | CCGTAATTGTTTCCCTTGAGGGG | 5322 |
| hs132678588 | CTCAATCCCCTCATATACAGAGG | 5323 |
| hs132680510 | ATAAACACTTTCATTTATCAGGG | 5324 |
| hs132678381 | GACCTAATAATTTCATGCGCTGG | 5325 |
| hs132681160 | AATAAGATTACCTTTCTGGTAGG | 5326 |
| hs132677613 | GTAAGCTTCGACCTCAGCCTTGG | 5327 |
| hs132682586 | GTACTTGAAATGTTACTGTCAGG | 5328 |
| hs132680895 | TGTGTGACGTTTTTGTAAAGTGG | 5329 |
| hs132678918 | GTGAAAACCCTCAAAAGAAAGGG | 5330 |
| hs132680069 | GTATTATCCATTTGCAGTAGAGG | 5331 |
| hs132682506 | TGAATCATTCTAATTGGTGAGGG | 5332 |
| hs132683085 | GCCTCTACAGCCATTTAAGTAGG | 5333 |
| hs132680737 | AGAACCTGATTTATTCAAAGAGG | 5334 |
| hs132682524 | TTAGAAATATGAAGAAATCAGGG | 5335 |
| hs132679225 | ACATTATATGCATAAGACATAGG | 5336 |
| hs132680351 | ATGTAAATAATCCGTGGGGGTGG | 5337 |
| hs132679308 | TTGACATCTGAATCTATGAAAGG | 5338 |
| hs132682326 | ATGCTCAGAGTGGATCTGATAGG | 5339 |
| hs132677970 | GTTGTGAATTATACTGCCAATGG | 5340 |
| hs132678637 | CTATGACGCGAGAGGATGGCAGG | 5341 |
| hs132678781 | GATTTGGTTCTGCATCAGGCTGG | 5342 |
| hs132678190 | CTAGGGCTTACCTTAGAGGCAGG | 5343 |
| hs132678477 | CATGTACAATTCATCCCATAGGG | 5344 |
| hs132680662 | TCATCCTCCCTCATAAGTATTGG | 5345 |
| hs132677925 | TATTTGATTTTAATTGGCAATGG | 5346 |
| hs132679059 | GGCACATGTTGCATAAAACTAGG | 5347 |
| hs132677928 | TCAACTAAGATAGACACAAAGGG | 5348 |
| hs132679149 | ACACAATCAGATTTATATTGTGG | 5349 |
| hs132678298 | CACAGCATTTTCTCAGGCATGGG | 5350 |
| hs132680240 | CTTCTGGCTCCCTTCCCTCAGGG | 5351 |
| hs132680605 | TCCCCATTTTATCATGTGAAGGG | 5352 |
| hs132682055 | TTGCACTTAGTATTATAATGAGG | 5353 |
| hs132677362 | TCTCTGGTGATGTCATTGTAAGG | 5354 |
| hs132678530 | AAAGGACTCAAACTTTTCGCGGG | 5355 |
| hs132681927 | ATAGTGTACTTCAATTCTGCTGG | 5356 |
| hs132678052 | AGGCTAATGTCTATTCAAATGGG | 5357 |
| hs132678019 | GGTAATTTGCCAGTAGGATGAGG | 5358 |
| hs132681577 | CATTTTGGAGGCAAGAGTTGAGG | 5359 |
| hs132682509 | AGTTTAAAAATCCAAACAATGGG | 5360 |
| hs132678233 | GTTCTGTAGATGTTCTATAGAGG | 5361 |
| hs132681518 | ATTAGATGATGAGACAAAATGGG | 5362 |
| hs132679747 | AGTCAGTGCTTTTAGTTTTGGGG | 5363 |
| hs132679967 | GTTACAGTCCAGTTACTTGAGGG | 5364 |
| hs132677411 | GGTTGCTTTTCTGACAGAAACGG | 5365 |
| hs132683079 | GGAAACTCTGTAAAGGGAGTAGG | 5366 |
| hs132681602 | ACTTTGGGCCGAAAATTTCAGGG | 5367 |
| hs132678272 | TGATTTCCAATCAGGTAGGCAGG | 5368 |
| hs132679943 | GTTCTCAGTATGTGACCTGCTGG | 5369 |
| hs132679764 | AAAAAATGTACATAATACTTGGG | 5370 |
| hs132682368 | CCCAGACAAAACCAGAATAGTGG | 5371 |
| hs132681716 | GGAGGAATTGGTCTTTCAGAAGG | 5372 |
| hs132682135 | TTAGAATCCAAGTTTACTCCCGG | 5373 |
| hs132680810 | ATTAAAATATTAAATGGGACAGG | 5374 |
| hs132680195 | TATCAGATCTGCTGGTTACAGGG | 5375 |
| hs132681305 | GCATAGTGAAACTGATGCCCTGG | 5376 |
| hs132679955 | TATTCTTTAAAGTTCCTTGGAGG | 5377 |
| hs132682824 | GAGCTAGAAGTTTTTATGGATGG | 5378 |
| hs132681249 | AGTTCTTGCTATCATTAAGAGGG | 5379 |
| hs132677989 | GTTTTCCTTCTGGCTGTGAGAGG | 5380 |
| hs132680848 | GGCAACCTATGGGATTAAGTAGG | 5381 |
| hs132679177 | AAGAGAAAGATTATAAGAAGAGG | 5382 |
| hs132680108 | TTTTGTTCACATGTAGGCTGAGG | 5383 |
| hs132678174 | AGATTTGATTCAACTGTCCATGG | 5384 |
| hs132681692 | AGCCACAGCACAACAAAAAGAGG | 5385 |
| hs132681424 | TTTCATGCCCATCAAATATGAGG | 5386 |
| hs132682734 | GCCCATTCTTCCTAATAGGCAGG | 5387 |
| hs132682530 | TTTCTTTAAGAACAGACTGTTGG | 5388 |
| hs132677620 | GAGGAGGGTGGGTCTATCCAAGG | 5389 |
| hs132679051 | GTTCTCAATAGCAAATTGCTTGG | 5390 |
| hs132682793 | TTTGTTTTCTGTGGTTGAAAGGG | 5391 |
| hs132683209 | AGCACTGCCTCAGAGCAATTCGG | 5392 |
| hs132681070 | GAATCCAAAGTATCTCTCATAGG | 5393 |
| hs132677801 | ACAGGGACAAGACCAAGAACAGG | 5394 |
| hs132682195 | GCTTTGATCCCATACAGAATAGG | 5395 |
| hs132679674 | TGTGCTGAAGTCTAAGACAAAGG | 5396 |
| hs132677855 | GCCTACACTGCTATAACCTTAGG | 5397 |
| hs132681130 | ATAAAAGTTTTAAAAAGCAAAGG | 5398 |
| hs132678831 | GAGCATTCTTGGGCACCAGCTGG | 5399 |
| hs132680104 | TATTGATGTAAACGTTATGCAGG | 5400 |
| hs132678696 | TTTATCAGACATTTTCTCCTGGG | 5401 |
| hs132683025 | GAGCAGCCTGCACAAGACTTTGG | 5402 |
| hs132681552 | TGACATACTCTCCAGCTGCTAGG | 5403 |
| hs132681281 | AGCAAAATGTCTTAACACTAGGG | 5404 |
| hs132681489 | GGTAGTGTTGGCTTTATACCAGG | 5405 |
| hs132681326 | ATATATTAGCATATGTTCTAGGG | 5406 |
| hs132680239 | GGGATAATACCCTGAGGGAAGGG | 5407 |
| hs132679944 | AGAACTGCATAGGCTTTGTATGG | 5408 |
| hs132679120 | AAGCATTTAGAGGGGAAGACTGG | 5409 |
| hs132680941 | GTGTTCTGCAGCAGGTTAAGTGG | 5410 |
| hs132678653 | TGATCCACATGATCTGGCCTCGG | 5411 |
| hs132677093 | TATGATTCAGTACCTAGCTCAGG | 5412 |
| hs132681802 | TAAGTCTTTGACCTTTCTAAGGG | 5413 |
| hs132677790 | TTCGACTTTGGAGAAGCAAAGGG | 5414 |
| hs132682206 | GTTTGAGAAGACATAGGGAATGG | 5415 |
| hs132678854 | GATATTTATATATTCGGCTGAGG | 5416 |
| hs132680575 | ATTCTCTTACCTTTTGAGAAGGG | 5417 |
| hs132677729 | GAATTGTATCTCTTCAGAAAGGG | 5418 |
| hs132681086 | ATACTTTTGGGTGGAGAGAGGGG | 5419 |
| hs132680036 | ATAACACTGTTAACTTACATGGG | 5420 |
| hs132678026 | TGGAAATTAAAATACAGTAAAGG | 5421 |
| hs132677496 | CAGAAGAAAAAGTTTAACTAGGG | 5422 |
| hs132677127 | TGACAAGACCTGTAAATGCCCGG | 5423 |
| hs132678942 | CCTCATAGTTTTAGGTAGGAGGG | 5424 |
| hs132677375 | GCTAGCTGCAAGGAATAACTTGG | 5425 |
| hs132678007 | CCAATGCTGTTTATCACCACAGG | 5426 |
| hs132682028 | GTCCTAGTCTTGCAAATGCTAGG | 5427 |
| hs132682783 | AAGTGCCTTTTCTATTCAGAAGG | 5428 |
| hs132681230 | TACCATAAAAAACTTCTAAGTGG | 5429 |
| hs132678676 | GAAGTTTGCCAAATAATACTTGG | 5430 |
| hs132680570 | TTAAGACATTATTAAAGTGTGGG | 5431 |
| hs132677050 | GCAAAAGACCACAATCTACCTGG | 5432 |
| hs132677248 | CTATTGACTTGCACTCCCACAGG | 5433 |
| hs132683120 | TCTCCCAATGAGTGATATGATGG | 5434 |
| hs132681890 | TTTGAACCTGAATCAGATGATGG | 5435 |
| hs132677305 | CTTAGCGACAGTTATGTCCATGG | 5436 |
| hs132677662 | ATATATAGCTTCCAAGAATGAGG | 5437 |
| hs132680252 | CTTACACTTGCCATTGGTCGGGG | 5438 |
| hs132680885 | ATTCGCAGGTGGTACTTGGTTGG | 5439 |
| hs132679791 | TTTTATAACCAGTTGACAGATGG | 5440 |
| hs132678528 | CTAAGGTTAATTTCAACGAAAGG | 5441 |
| hs132683282 | ACACTATGAGAGAAATAAAACGG | 5442 |
| hs132679466 | TTTTCCCCCTAGTTTAAAAGTGG | 5443 |
| hs132677207 | GTGCCCCAGCTAGGTGTACATGG | 5444 |
| hs132683200 | GATCAGTTATAACAGACTTAGGG | 5445 |
| hs132678193 | CAGGTAAAGAAAACAATCTAGGG | 5446 |
| hs132681487 | CTAACAAGCTAGCAAAATCCTGG | 5447 |
| hs132683236 | TTACAAAATCAGACCCATAGAGG | 5448 |
| hs132678843 | TGTATTGCCTTATATACACCTGG | 5449 |
| hs132683187 | TTGATTCAGTTTAAGCCACTTGG | 5450 |
| hs132679193 | AGAGACTCCACTCTTTTGCTAGG | 5451 |
| hs132681896 | AACATTGATAAATTAAACATTGG | 5452 |
| hs132680249 | ATAATCCTTACACTTGCCATTGG | 5453 |
| hs132682605 | ATTTCACTTGGCCTATCTCAGGG | 5454 |
| hs132682462 | ACCTTTTCTAGGATAAAGCTTGG | 5455 |
| hs132678902 | TAGAGCTATTTTTAAAGCAGTGG | 5456 |
| hs132680203 | GCAAAGTGATCTCTGCCAGCTGG | 5457 |
| hs132677242 | TATTAGTTTGGCATCCCTGTGGG | 5458 |
| hs132677909 | AAAAAAATATCTTTCAGCCAGGG | 5459 |
| hs132681769 | CATCTGAGAGGACGACAGCTAGG | 5460 |
| hs132677671 | CATTGGTGCTCAATATACTAAGG | 5461 |
| hs132680886 | GCGAATTGGACAAAATTCAATGG | 5462 |
| hs132681247 | TATCATTAAGAGGGGACAAATGG | 5463 |
| hs132679118 | AATGTAACTAAGCATTTAGAGGG | 5464 |
| hs132678834 | AATGGGAGTGTCTGACCAGCTGG | 5465 |
| hs132680085 | CTTGAGTTAGGTGTAAAGAATGG | 5466 |
| hs132682600 | CTTCTTCCGTGGCAATATGCAGG | 5467 |
| hs132682115 | GGGCAACTAATTCTGAAAACGGG | 5468 |
| hs132678987 | ACTCTTGTGGGTGGCAGTAAGGG | 5469 |
| hs132680581 | GCACACACTCCCTTCTCAAAAGG | 5470 |
| hs132678167 | AAAGTAGTAGAAAACAATAGTGG | 5471 |
| hs132677541 | TCTTTTTTGCAAGATTGCATTGG | 5472 |
| hs132681301 | CCTGTACTTGATATGCTTGGAGG | 5473 |
| hs132677669 | ACTAAGGATTTTTCAATGCAGGG | 5474 |
| hs132678888 | CCTGCCTCCTATTATACCCTAGG | 5475 |
| hs132679470 | CAGGGGCCACTTTTAAACTAGGG | 5476 |
| hs132682996 | TGATAAGTCCTATGAGAAGCAGG | 5477 |
| hs132680731 | GGTAGAGAGTTTCTTTCCCAAGG | 5478 |
| hs132678509 | ACCTAAACTGCAAAGCAAACCGG | 5479 |
| hs132679034 | GGTCAAAATGTCACACCAAAAGG | 5480 |
| hs132682777 | TGAGCAAGAAGGTAACCAAAAGG | 5481 |
| hs132678726 | GCAAATTTAATCACCTCTGAGGG | 5482 |
| hs132680296 | CTCAACCTAATTTATTTCTGCGG | 5483 |
| hs132679274 | TCAAATTCTATGAGGTAGAGAGG | 5484 |
| hs132679391 | TGTATTTTGTCTTTGTGCAAAGG | 5485 |
| hs132680716 | ATAAAACTGAATCCTTAAGCTGG | 5486 |
| hs132678136 | TTAGCTAACTTGCTTTACCTTGG | 5487 |
| hs132678256 | AGGAAATAGTAGGGTGACATAGG | 5488 |
| hs132677870 | CTTTAATCCAGTGCCAGGCCCGG | 5489 |
| hs132681224 | TAGAGACCCTTGACTAATGCAGG | 5490 |
| hs132678108 | AAGAAGAGACGAATTTTGCTTGG | 5491 |
| hs132678514 | GCTCTTGTCTCAAGATGACTTGG | 5492 |
| hs132680881 | GCGTCTTGCCTACCTGTCTCCGG | 5493 |
| hs132679812 | ATGTATGTATGGTACATGTAAGG | 5494 |
| hs132681548 | GACAGGTCATCCCTAGCAGCTGG | 5495 |
| hs132681482 | ATTTGCATCATTGTCCCTGCAGG | 5496 |
| hs132677470 | TTTCTTCTATCATTTCCAAAAGG | 5497 |
| hs132680297 | TTGAGCAAGACTACACCTAATGG | 5498 |
| hs132683159 | TATACATTCCTGCCTTTGATGGG | 5499 |
| hs132679987 | AATATCCAAAAGTTAATCAATGG | 5500 |
| hs132682837 | TTATTTTCAATGATTTTCCATGG | 5501 |
| hs132680601 | TTTGGGAGAAGAAATTCAGTAGG | 5502 |
| hs132680879 | AATTCAGAAGGACCGGAGACAGG | 5503 |
| hs132677412 | CTTTTCTGACAGAAACGGTATGG | 5504 |
| hs132682650 | GAGTGAGTAGTATGAGCAAATGG | 5505 |
| hs132681512 | GGGATGAAAGAGGAGACAAAGGG | 5506 |
| hs132679898 | GGAACTCAGGTAAAACTAGTAGG | 5507 |
| hs132679849 | ATGCTGTTCTCCCCAAAGCAGGG | 5508 |
| hs132679700 | CTCAGACTTAGTCATCTAAAGGG | 5509 |
| hs132678001 | CAGACTGTTCTTGGGCCGCTGGG | 5510 |
| hs132680819 | TTTCAGGGACATATTCAGAAAGG | 5511 |
| hs132678106 | AGACGAATTTTGCTTGGCTAGGG | 5512 |
| hs132680687 | CTTAATTTTGTAATTTCCCAGGG | 5513 |
| hs132677414 | CTGTCAGAAAAGCAACCATTGGG | 5514 |
| hs132679153 | TGGAATAGACTAAACTGCACTGG | 5515 |
| hs132679163 | CCTTATCCATCCTTACTACCTGG | 5516 |
| hs132682126 | TTACCAAGTTTCCATTTACAAGG | 5517 |
| hs132682701 | GATGTACTATTTTTGAAGCCAGG | 5518 |
| hs132682742 | GCAATGTCTGTGAATTGCCCAGG | 5519 |
| hs132678485 | AAGACAAAACCCCAGAGAAAGGG | 5520 |
| hs132680634 | AAACACTCAGAGTAGACAACAGG | 5521 |
| hs132677121 | ACTTCCACGATTAAAAACATAGG | 5522 |
| hs132678443 | CATGCTCACGATTCTTGCCTGGG | 5523 |
| hs132677977 | ACTCTTTTCATGATTAGAGATGG | 5524 |
| hs132682419 | ATCTCTTTCCCTTCAAGAGAGGG | 5525 |
| hs132681393 | GGAGTCCTATAGGATAATTTGGG | 5526 |
| hs132680564 | TGTAAAGCTGGACTTCAAGTTGG | 5527 |
| hs132681303 | ATATTACTGCAGTACAAGCCAGG | 5528 |
| hs132679142 | GGCATTTTGTGCAATGCTGAGGG | 5529 |
| hs132681551 | GACATACTCTCCAGCTGCTAGGG | 5530 |
| hs132677761 | CCTGCTTTGCTCAAATGTCAGGG | 5531 |
| hs132679609 | CATCTTTAAAAAGTTTCTATGGG | 5532 |
| hs132677817 | TCGCCTGGCTTGTTTGTGCAAGG | 5533 |
| hs132679060 | TCATAAAATGTAATATCTGTTGG | 5534 |
| hs132681066 | GGTCCTTGGAGCAATCGTATTGG | 5535 |
| hs132682607 | GGTCTATTCATAGACTTGTATGG | 5536 |
| hs132679573 | GTATTCTTATTCCCATTATGTGG | 5537 |
| hs132680076 | AGTATTCTACTTAGAGAAAGAGG | 5538 |
| hs132679422 | ATTCCTTTACACTCTAAAAGTGG | 5539 |
| hs132681437 | GAGTCCCAAGTACACCTTGATGG | 5540 |
| hs132678010 | TTGACTTTGCCCTTGCCAAAAGG | 5541 |
| hs132681680 | GTGACATACAAAAAGTCTACTGG | 5542 |
| hs132677968 | ATTGTGTTAATGGATTATAATGG | 5543 |
| hs132679665 | GATCAGCCTTTGGTAGAGATAGG | 5544 |
| hs132679860 | TCTCTTTCTAACGGTAAAAGTGG | 5545 |
| hs132677145 | TTTTTGTCTAAGTATATATGTGG | 5546 |
| hs132681027 | TTACGTATGTATGACTTGCTTGG | 5547 |
| hs132680714 | TGTTGTACCTCAAATAGCTTAGG | 5548 |
| hs132682247 | TGGCATGTCACCTAACTGGCTGG | 5549 |
| hs132683125 | TGTACTTCCCTTTATTAAGCCGG | 5550 |
| hs132682696 | TACTGCTTTGGAGTATTGAAAGG | 5551 |
| hs132683197 | TCTATTATCAAGCATATCCTAGG | 5552 |
| hs132682198 | TTAAAAAGCACCTAGAGGATTGG | 5553 |
| hs132680825 | CTTTGTGGATATGTGACTAAAGG | 5554 |
| hs132680796 | CACAGAAAGTTGGAACCAAAGGG | 5555 |
| hs132679827 | TTCTGCTTATGTGTAAGCCTTGG | 5556 |
| hs132679841 | ACTTAGAGAGTATACATTGAAGG | 5557 |
| hs132680408 | TGCCTAGTCCCAATTTCTGGTGG | 5558 |
| hs132677049 | TCAAGGCAGTTACGGGTAAAGGG | 5559 |
| hs132682333 | TAGGATTAGCTTATCCCAAAGGG | 5560 |
| hs132678875 | GACTGCTCTGGGTTGTACTAAGG | 5561 |
| hs132677176 | ACATGAATCCCAAAGCCATCAGG | 5562 |
| hs132681168 | TGTTTTTTCTCCTAAATAGCAGG | 5563 |
| hs132682420 | TTTCCCTTCAAGAGAGGGAGTGG | 5564 |
| hs132677269 | CATGAATTCCTCCTTGGGCCAGG | 5565 |
| hs132682699 | TGAAAGGAGTTTTAGTATAGGGG | 5566 |
| hs132682953 | GAGACCACTCCAGAGAATATAGG | 5567 |
| hs132678948 | ATAATACAAGTCGAAAAAGTTGG | 5568 |
| hs132678908 | GTTGCTCCAAATTTTAACTTGGG | 5569 |
| hs132680043 | ACAAACAAATATAATGAAAACGG | 5570 |
| hs132680390 | TTTATTTCAAGAAAAAAAGCAGG | 5571 |
| hs132682369 | ATGATTTGCTTTCATCATGATGG | 5572 |
| hs132679458 | AGAAACCCAGCAAGCTGAAAGGG | 5573 |
| hs132683034 | GATCTATGTAAAACCTTCCATGG | 5574 |
| hs132679447 | AAATGAGTGAATACATAAAACGG | 5575 |
| hs132679329 | TTGCATCTCACTAGGCAAATGGG | 5576 |
| hs132683189 | TAGACACTTTTGAAGAAGATGGG | 5577 |
| hs132681679 | TTATGGGATAAAGAAACATATGG | 5578 |
| hs132680445 | CATACTAGATTAACTTGAAAGGG | 5579 |
| hs132678337 | TCATACACATTTTTAAAAGCAGG | 5580 |
| hs132679285 | GCTCTGCTGCATGGTAGAACAGG | 5581 |
| hs132680878 | TTTTATGAATTCAGAAGGACCGG | 5582 |
| hs132681615 | GAAAACATGTTATATGAGAATGG | 5583 |
| hs132677276 | CCACTCAGTTCACTTGATAAGGG | 5584 |
| hs132678483 | GATACAGTGCCAGGATTTGAAGG | 5585 |
| hs132680957 | ATATTTCTGAGGACTGGGGGTGG | 5586 |
| hs132677175 | GGGAAAGGTGAGAGAAGTCTTGG | 5587 |
| hs132679479 | ATCAAACTGTGAATTTAAAGTGG | 5588 |
| hs132680207 | TGTGAATCCCCAGCTCCAGCTGG | 5589 |
| hs132682598 | ATATTGCCACGGAAGAAGGCTGG | 5590 |
| hs132678266 | CTGGGCCTGCTGTATTCCCTGGG | 5591 |
| hs132682795 | CATTTGTTGTTTGTTTTCTGTGG | 5592 |
| hs132677461 | TTGCAACTGCTGTTTAAGCTGGG | 5593 |
| hs132681316 | TCATGGATCTACACAACCTCTGG | 5594 |
| hs132677105 | TGGGAGCTCTCACAAGCCTTGGG | 5595 |
| hs132678191 | GATTGTTTTCTTTACCTGCAGGG | 5596 |
| hs132681382 | GAGAGTGAGAACGAGGATGAGGG | 5597 |
| hs132677818 | AGCCAGGCGAGAGAGAAAACTGG | 5598 |
| hs132678126 | AGTTATTTATGAATACAAACAGG | 5599 |
| hs132681151 | ATTAAAGTCAGCTTTGCAAATGG | 5600 |
| hs132678144 | ACATCCAGATATTCAATAGTAGG | 5601 |
| hs132681933 | ATACCTGGAAGATATATAATGGG | 5602 |
| hs132678743 | CTCATTCCTACTTAATAGGATGG | 5603 |
| hs132677596 | ATCATTATCAGCTTGAAAAGTGG | 5604 |
| hs132681706 | ATTGTTTGCTACCAGGAGAAAGG | 5605 |
| hs132677912 | AGACAATGCTAGTTTTAGTAGGG | 5606 |
| hs132679597 | TCAGGTGTGATACTGTAAACAGG | 5607 |
| hs132677697 | CTTCAAGAGAGGATGACTATAGG | 5608 |
| hs132679565 | TTCTGGCCTTAAGTTCAAAAGGG | 5609 |
| hs132680830 | TTGCCTCTGCACCTTTACACTGG | 5610 |
| hs132679316 | TTTAAAATATCAACTACCTCAGG | 5611 |
| hs132681240 | GTATGCTAATTAAAATATACAGG | 5612 |
| hs132677394 | CATTTTACCAGGTATTCTAAAGG | 5613 |
| hs132681093 | GATGGTATATATATAATCCTTGG | 5614 |
| hs132677281 | TTTTAGGTCCTTTCGTGTTGTGG | 5615 |
| hs132680192 | ATGTACAAGCCCGAAAAGGCTGG | 5616 |
| hs132679683 | GACCCTTGCAATAGATAAGTTGG | 5617 |
| hs132678454 | CCAGCAAACACAGTGCTCAATGG | 5618 |
| hs132679105 | TGTATCATGCATACTAAAGATGG | 5619 |
| hs132680084 | TCTCTATGACACACTATACTAGG | 5620 |
| hs132682558 | CGCTGTTTCCCGAAATGCCAAGG | 5621 |
| hs132678199 | GATCAAGAATGGATGGAAACAGG | 5622 |
| hs132682281 | ACAAGTAGCAGGGTAGAATCAGG | 5623 |
| hs132682066 | AATTTACTAAGTTATTTGAATGG | 5624 |
| hs132679279 | GGCATGTTTGGTCTTGCAAAGGG | 5625 |
| hs132682534 | TTAGACCAACGCATTGTAGTTGG | 5626 |
| hs132677768 | CAGCTTTTAAAAGGAGGAGGGGG | 5627 |
| hs132680009 | TACTAAACACAGACAAATGATGG | 5628 |
| hs132679903 | CACAGAAATTAACTTCAATAGGG | 5629 |
| hs132677232 | AACATACTATTTCTCTTGGATGG | 5630 |
| hs132680722 | CTCACTGTCAATTTTGAGTGGGG | 5631 |
| hs132680569 | GTTAAGACATTATTAAAGTGTGG | 5632 |
| hs132680940 | GGAATAACAAATGAATCATAAGG | 5633 |
| hs132680860 | AGTGATCTCCCTAAGCATACAGG | 5634 |
| hs132678873 | TCTGGGTTGTACTAAGGAGTAGG | 5635 |
| hs132680521 | GGCATCACTAGGAATACAACAGG | 5636 |
| hs132679022 | AACACTAATCAAAAGCAAATCGG | 5637 |
| hs132677672 | TCTATCTCGTAAATAAGAGCTGG | 5638 |
| hs132679937 | ATTTTTCCAAATGACTAAGTAGG | 5639 |
| hs132683231 | AAAATGTTTGTCATAGAAAAGGG | 5640 |
| hs132679440 | AACACTAAACCAGTTTCAAAAGG | 5641 |
| hs132678442 | TGAGCATGTGTCTTAGCAAATGG | 5642 |
| hs132678779 | GCATCAGGCTGGTAGTTGCTAGG | 5643 |
| hs132680749 | TGTAGAGAAATAAGAGGAACCGG | 5644 |
| hs132680767 | TGGAGAAGCAAGAGAAGCTAAGG | 5645 |
| hs132681428 | TGCAGCTCCTCATATTTGATGGG | 5646 |
| hs132681910 | CCAAAATTCCATTGGAATGACGG | 5647 |
| hs132682924 | TGTCTATTGCCAAATGTAAAGGG | 5648 |
| hs132680987 | TGAGCCACTTTATTGTTGATGGG | 5649 |
| hs132680715 | ATTGCACTGCACATTGCCTTCGG | 5650 |
| hs132678968 | GCCAAAATAAAGGGGATGTCAGG | 5651 |
| hs132678583 | TGGAGTACAGTTCAAAAATAGGG | 5652 |
| hs132680277 | GCTGAAATGAGACACGTTGCCGG | 5653 |
| hs132682027 | TCCTAGTCTTGCAAATGCTAGGG | 5654 |
| hs132680138 | CTATTGTAGCCATATCAATAAGG | 5655 |
| hs132681988 | CCATCTACCCTGATTTTTGGAGG | 5656 |
| hs132682897 | TTTTGTGTTTCAGGGCAGATAGG | 5657 |
| hs132678441 | GCCTGGGTCTGACATAACTTTGG | 5658 |
| hs132682136 | AGGTTCTCCGGGAGTAAACTTGG | 5659 |
| hs132677113 | TGCTCTTTACATACACTCCTTGG | 5660 |
| hs132679758 | ATCCATCTAGTGTTTGATTGAGG | 5661 |
| hs132677960 | TTTTGGCTATAACCTCTAAAGGG | 5662 |
| hs132678375 | GTGTCCTTATAGCTTCTTGGTGG | 5663 |
| hs132679299 | TTTACGTTCAAATGTTGTAAAGG | 5664 |
| hs132682507 | TCATTTGCATCACTGCTGCTTGG | 5665 |
| hs132680137 | ACTGATCTATCAGCCAAAATCGG | 5666 |
| hs132680118 | CTATGTTACACTCAGTTAGCTGG | 5667 |
| hs132682892 | TTTCACTGCAATCCTTTCATGGG | 5668 |
| hs132680435 | TGTGAGGCCAGTTTGCTAAAGGG | 5669 |
| hs132678703 | ATAGATCAGCTGCTACACTATGG | 5670 |
| hs132681359 | GGTGATCTACAAGAGAAGTTGGG | 5671 |
| hs132677933 | AATAATTGCTAGAGGGAAAAGGG | 5672 |
| hs132679713 | TGATCAAAAAAGTATAAAACAGG | 5673 |
| hs132679354 | TTAAACTACATTGAATTCCCTGG | 5674 |
| hs132677957 | ATTCAGGTAAGTGCTTAATTGGG | 5675 |
| hs132678301 | ATAAGACACAGCATTTTCTCAGG | 5676 |
| hs132680535 | GAGAATCTATATTCTACATAGGG | 5677 |
| hs132679641 | TTGTATGGATTTTATCTGATGGG | 5678 |
| hs132679397 | GTTGTGCTTTGGTTTACCTTGGG | 5679 |
| hs132679209 | AATCATAGATTCTTTGCTAAGGG | 5680 |
| hs132682250 | TTAGGAAGCACCAGCCAGTTAGG | 5681 |
| hs132677758 | CATGTGTCCTGAGGACCTACAGG | 5682 |
| hs132682237 | GCTGACGCTGACACGGGCATTGG | 5683 |
| hs132682675 | TTGAAGACTCCCTTTTAAGTTGG | 5684 |
| hs132679006 | TATTATACTAAATTAAAAACAGG | 5685 |
| hs132679913 | CTTCAGTGTGTACAGTAATAGGG | 5686 |
| hs132682225 | TTTTGCCTGGATAATTCAAATGG | 5687 |
| hs132682844 | AACAGGGCCTTATGATTAAAGGG | 5688 |
| hs132679862 | GTATTTTGTACATGAGGAAAAGG | 5689 |
| hs132680116 | CTGAGTGTAACATAGAATATAGG | 5690 |
| hs132682531 | TTAAGAACAGACTGTTGGCCAGG | 5691 |
| hs132679864 | AATTATCAAACCCCATTATGAGG | 5692 |
| hs132683127 | ATCCATGCCGGCTTAATAAAGGG | 5693 |
| hs132680571 | CTTAACTAATCACATTGCTTGGG | 5694 |
| hs132682216 | CTGTTTCTAGAACTATATTGTGG | 5695 |
| hs132681815 | GACAAAGTTCCTTATTTGCTCGG | 5696 |
| hs132677136 | TGTTCCCTGCTTGAAGTACCCGG | 5697 |
| hs132682933 | CTGTGAAGCTCTAAAACAACAGG | 5698 |
| hs132683080 | ACATTTGGAAACTCTGTAAAGGG | 5699 |
| hs132678231 | TATTAAGAATATCATGAAAAGGG | 5700 |
| hs132682677 | CATTCATTGCCAACTTAAAAGGG | 5701 |
| hs132677158 | TTGTTTTTCAAATTGAATGAAGG | 5702 |
| hs132681578 | CAAGAATGAATGCATTTTGGAGG | 5703 |
| hs132679732 | TTTTCTTCATCACCAAATACAGG | 5704 |
| hs132677499 | AAAGTCTTCCATGTGAGATTCGG | 5705 |
| hs132681133 | ATCTCTGTATCTTCAGGCACTGG | 5706 |
| hs132677609 | TAGACTGTAATATCCAATATGGG | 5707 |
| hs132679804 | TGTACTATGTGCAATTAACTAGG | 5708 |
| hs132678956 | TCTACTAATCCATTGAACTAAGG | 5709 |
| hs132681376 | GTGATGCCAAAACAAACAACTGG | 5710 |
| hs132680808 | TTTAATCTGAAGAAATCCTTGGG | 5711 |
| hs132681508 | TATGTTCCTGGTTCAGGAAACGG | 5712 |
| hs132677730 | TGAATTGTATCTCTTCAGAAAGG | 5713 |
| hs132677065 | GAGTTATCCAGTATGAGAATAGG | 5714 |
| hs132678321 | TTATCTTTGATTTCGATTAGAGG | 5715 |
| hs132682908 | AAAAGGTCATTCCCCTTTGAGGG | 5716 |
| hs132683266 | AAATATGCTCTAAACTATAGTGG | 5717 |
| hs132681827 | CTTCAGTGGGTCAAATCCCATGG | 5718 |
| hs132680727 | CTAAAACCCCTCTTGGCCTTGGG | 5719 |
| hs132682805 | AATAATTTGAATTAAAAAAACGG | 5720 |
| hs132681477 | GCTTGACTTAGCTCTGTGATTGG | 5721 |
| hs132682722 | GTTCTGGCAGGGACTGAAGTTGG | 5722 |
| hs132677917 | TGACACTAATCTGTGCCAAATGG | 5723 |
| hs132681882 | TGATCTCCAACTCTGACAATGGG | 5724 |
| hs132679264 | ATACTGTTAAACACAAAATCAGG | 5725 |
| hs132677706 | TTAAAATGTTCAATGGTAGTTGG | 5726 |
| hs132679286 | GCTGCATATTATATTTTCCATGG | 5727 |
| hs132678847 | CAATTCTTCTTGCTAAGGCCTGG | 5728 |
| hs132683243 | TATGCCACTCTTAAAGCCTTGGG | 5729 |
| hs132682859 | CTTAGTTTGCACTCATCACCTGG | 5730 |
| hs132677995 | CTTTTCAAATTTTTACCAAAAGG | 5731 |
| hs132682044 | ATCTGCATTTAATCAACCCTGGG | 5732 |
| hs132679725 | TAGATAATCTACAGAACAAATGG | 5733 |
| hs132678296 | ATTTGTGCTTGTCATTAAGCTGG | 5734 |
| hs132677863 | CTGCTCTTTTCCCTTCTGTAGGG | 5735 |
| hs132678032 | TCTTTTCCAGTTCAACAGGCTGG | 5736 |
| hs132681839 | ATTATCTTTGAAGAACTCTTGGG | 5737 |
| hs132679523 | GTACTCTTGCTCTCAAGCTCTGG | 5738 |
| hs132682989 | CCCCCCTGCCTGCTTCTCATAGG | 5739 |
| hs132679398 | TGTTGTGCTTTGGTTTACCTTGG | 5740 |
| hs132681279 | CTCAAACCTGAGTAATAAACAGG | 5741 |
| hs132679300 | GAGATCCTGTATCGTCATATTGG | 5742 |
| hs132680971 | TTAATATCAGAGTTACCCTTAGG | 5743 |
| hs132682455 | TCTGTTACCATTACTGCTGTGGG | 5744 |
| hs132680281 | GATAGATGCACATCAACTTAAGG | 5745 |
| hs132681038 | CTTCTCAAGCTCCTTGTAAGTGG | 5746 |
| hs132681524 | CTACACTATAAGATAAATGTAGG | 5747 |
| hs132678819 | TTGGGCGTCAAGGTTGATAAGGG | 5748 |
| hs132682188 | TGTGCACACACAACACATTACGG | 5749 |
| hs132680786 | GCTTGCCAGTTTTTTTCAGTGGG | 5750 |
| hs132677473 | TTAGGAGCAATTTTATTGGCAGG | 5751 |
| hs132678015 | CTATGCCCTCCTCATCCTACTGG | 5752 |
| hs132682929 | GCATGAAGCATTAGTGGTGGTGG | 5753 |
| hs132681401 | TGAAGCCAAGATGAGGTAAAGGG | 5754 |
| hs132678625 | AGGAACCTCAAATCAGACTATGG | 5755 |
| hs132678476 | GATGAATTGTACATGAAATCAGG | 5756 |
| hs132680590 | TAAATTGCCATGGAAATCATAGG | 5757 |
| hs132682120 | CTTATACAGATGTAGAGCTTAGG | 5758 |
| hs132680329 | ATCTCTCCCCCTTAGACAACCGG | 5759 |
| hs132680793 | TGAACGATGGTGCTCCCCTTTGG | 5760 |
| hs132677442 | TTCTTCTTCCATGCCTGTAAGGG | 5761 |
| hs132677641 | TCATGTTTGTTTACCTGCAATGG | 5762 |
| hs132677420 | TTTCTTCTCTGCAATTTCCCTGG | 5763 |
| hs132677237 | AATTCTATAGAGTAAGTTGCAGG | 5764 |
| hs132677283 | TAGTATGAAATAAAGAAATACGG | 5765 |
| hs132677410 | TTAGCCTTCATTTCCATCACTGG | 5766 |
| hs132682118 | TTTCAGAATTAGTTGCCCTATGG | 5767 |
| hs132680056 | ATACACACAGGCAATCAATATGG | 5768 |
| hs132677536 | TATTTCTCATAAAAACTCCTAGG | 5769 |
| hs132680764 | CCTACCTTAGACTAGGCATATGG | 5770 |
| hs132679603 | GTAAATTTAATGATGTCTAAAGG | 5771 |
| hs132677182 | AAGACACAAGGACTACGTTTGGG | 5772 |
| hs132679958 | GTAACAAGATCTGAATGTTTGGG | 5773 |
| hs132683242 | CTATGCCACTCTTAAAGCCTTGG | 5774 |
| hs132682372 | TCTTCATTCTTTTCGTGTGAAGG | 5775 |
| hs132682830 | ATTTACAAGTTAACGTTCACTGG | 5776 |
| hs132677650 | CTTAAGTATGGGGAGGGCGGGGG | 5777 |
| hs132681018 | TCAATCTGAAATTTAACATAAGG | 5778 |
| hs132678089 | AATAGGCTGAAAGCTCCAACAGG | 5779 |
| hs132680938 | ACAAATGAATCATAAGGTAGAGG | 5780 |
| hs132680724 | CTCTCACTGTCAATTTTGAGTGG | 5781 |
| hs132682425 | ATGCTAATCCAAAATAATAAGGG | 5782 |
| hs132680045 | GTTTAAACAGAACAAGGAATTGG | 5783 |
| hs132677149 | GTGTTATGTTCTTTTTCCCATGG | 5784 |
| hs132680181 | TATTTGAATAAATATCATAAGGG | 5785 |
| hs132678928 | AGGAACAAGCACGATTTTAAGGG | 5786 |
| hs132678360 | ATATGTTGTTATACAGTCATTGG | 5787 |
| hs132682851 | CTACGGAGAGTACTTTTCATAGG | 5788 |
| hs132682207 | ACAGTTCACTGAAACTTAAAGGG | 5789 |
| hs132683213 | TGAGTTGTGATAAATGATAATGG | 5790 |
| hs132681049 | TTACATTCATTGTAACCTCTTGG | 5791 |
| hs132679339 | ATAAAAACAAAACAGTTAGATGG | 5792 |
| hs132678244 | GTCTTAGTATAGGGGACATTGGG | 5793 |
| hs132680421 | GTACATAGTCACTTTATAAGAGG | 5794 |
| hs132681149 | TAACTTAGAGATATAATAAGTGG | 5795 |
| hs132680414 | GTTTTATCCCACCAGAAATTGGG | 5796 |
| hs132683093 | CATTACATAATGACAAAAATGGG | 5797 |
| hs132678342 | AATGTAGAAGCGAAATTTGAGGG | 5798 |
| hs132678923 | GCTGTTATTCAGGTGCTTGAAGG | 5799 |
| hs132681880 | TTATAATTTACAAGTTCTTAGGG | 5800 |
| hs132682988 | GACAGTGAAGACTCAATAACAGG | 5801 |
| hs132682732 | TCCTGCCTATTAGGAAGAATGGG | 5802 |
| hs132679912 | AGTATCCACACACATTTCATTGG | 5803 |
| hs132680454 | AGTATGTTATCCTCAGGCTTTGG | 5804 |
| hs132679297 | TACAACATTTGAACGTAAAACGG | 5805 |
| hs132682723 | TCCTTTTGCTTGTTCTGGCAGGG | 5806 |
| hs132679270 | GTAGAGAGGGATTTGGGCTGAGG | 5807 |
| hs132677061 | GCTATGACCTATTCTCATACTGG | 5808 |
| hs132677474 | ATTGTAGGTCCCATTTGTAATGG | 5809 |
| hs132679692 | CAAAAAATAGAGAACCTTGTAGG | 5810 |
| hs132683223 | ATAACTTTCCTAAATATCCTAGG | 5811 |
| hs132683274 | CCCTCATATCTTCTTCTGCTGGG | 5812 |
| hs132679541 | TCTGTTTTTGATGTTGCAGATGG | 5813 |
| hs132682686 | CTTTTTCCATATCATTTCCTGGG | 5814 |
| hs132683060 | ATATATTGTCCCAACTGAACAGG | 5815 |
| hs132682601 | GGGATCCTGTACCCTGAGATAGG | 5816 |
| hs132678448 | AGGCACTTCAGCAGGATATAGGG | 5817 |
| hs132677070 | TTTGCTCAGGAATTATACTAAGG | 5818 |
| hs132678615 | GCTAACAATAAAATACTAATGGG | 5819 |
| hs132679179 | GGTGTAGTAGAGAGGAAGATAGG | 5820 |
| hs132677999 | GACTGCGGCAGACTGTTCTTGGG | 5821 |
| hs132679190 | AAGGTTTTGAGCAGAATAAAGGG | 5822 |
| hs132680936 | TGATTCATTTGTTATTCCTAGGG | 5823 |
| hs132678958 | TCTCCACTTTCCGCAGCAAATGG | 5824 |
| hs132679532 | GACAAGCAAGAGATAAATATCGG | 5825 |
| hs132677047 | GGCATGATCAAGGCAGTTACGGG | 5826 |
| hs132677898 | GGAGGGACTTTTTTTGGAGTTGG | 5827 |
| hs132680298 | CCTAATTTATTTCTGCGGCTTGG | 5828 |
| hs132677633 | AAGACACTGAAGAAAGAATAGGG | 5829 |
| hs132681909 | CCTTTTGTCCAAAATTCCATTGG | 5830 |
| hs132680532 | TTAAATCTAATACAGTCGTTTGG | 5831 |
| hs132677244 | TGTGGGAGTGCAAGTCAATAGGG | 5832 |
| hs132681368 | TGTATGACCTTTATACACTTTGG | 5833 |
| hs132683118 | AAAACCATCATATCACTCATTGG | 5834 |
| hs132678561 | CCAGGCATCACTGTTTATGATGG | 5835 |
| hs132680723 | TCTCACTGTCAATTTTGAGTGGG | 5836 |
| hs132682927 | AATTTTGCATGAAGCATTAGTGG | 5837 |
| hs132680606 | TGATAAAATGGGGATTTTAGTGG | 5838 |
| hs132680812 | TTCAGATTAAAATATTAAATGGG | 5839 |
| hs132678503 | TTAAGTTCAGATTCAAGAAAAGG | 5840 |
| hs132680905 | GCTGAATATTGCGACAATATAGG | 5841 |
| hs132679203 | ATAATTTCATAGTAATAAGTAGG | 5842 |
| hs132677171 | ACTGCTGTTTATTCAAAAAGAGG | 5843 |
| hs132680748 | GTTTGATGTAGAGAAATAAGAGG | 5844 |
| hs132679107 | TGTCAGCTCCTAGATCTTCCAGG | 5845 |
| hs132681242 | GCTGCTTTTGAGCTATTTGAAGG | 5846 |
| hs132677538 | TTACTGCTGAAATTGAATATGGG | 5847 |
| hs132677036 | TATAGCTTTAGTTTTCAAAAGGG | 5848 |
| hs132679002 | ATTCAGGCCTGAGATACATTTGG | 5849 |
| hs132678403 | TTTACTTCTTCCATTCAATTGGG | 5850 |
| hs132678707 | TTTTGTTTTGATTATTCGGTTGG | 5851 |
| hs132681859 | GATAAAGGCAGAAATAGAATTGG | 5852 |
| hs132677534 | GCAGTTGCTCCTGGACAGTATGG | 5853 |
| hs132678427 | AACCTTCTCTGTTGTGGTGGCGG | 5854 |
| hs132680783 | TGATCCCCACTGAAAAAAACTGG | 5855 |
| hs132678768 | CACCCAGTGCATGTTTTCATAGG | 5856 |
| hs132682063 | GATATAATAAAAACTATTGCAGG | 5857 |
| hs132681436 | CCTCCTCCACTCCAAATCTTAGG | 5858 |
| hs132682142 | GATGTTTTTGAAATAGGTTAAGG | 5859 |
| hs132677988 | CTTCTGGCTGTGAGAGGCATAGG | 5860 |
| hs132677097 | GCTGGACTCTAAGTTCTATAGGG | 5861 |
| hs132683229 | AGAATATCGTCTATTCTTTGTGG | 5862 |
| hs132680354 | GGTAATATTAGACGAGCAAAAGG | 5863 |
| hs132680307 | AGTCATCATCAAAAAACAATAGG | 5864 |
| hs132681250 | TAGTTCTTGCTATCATTAAGAGG | 5865 |
| hs132679846 | CTTTGGGGACCCCTGCTTTGGGG | 5866 |
| hs132681309 | GTATTGTATGAAAGCTTCATTGG | 5867 |
| hs132680125 | TTTTGCCTGCTTCTGTAAAGTGG | 5868 |
| hs132683277 | GACATATTCTAGCTACTTGATGG | 5869 |
| hs132678952 | CAAAATCCAGATAAGCCTTTGGG | 5870 |
| hs132677307 | TTTGGTGTTTCCAATGTCTAGGG | 5871 |
| hs132678009 | AGTCATGTGCCATATGTAAATGG | 5872 |
| hs132681605 | AAGTTATTTTTACTCCATAAGGG | 5873 |
| hs132680438 | ACAGAGATATGCTCAGTGTTAGG | 5874 |
| hs132680169 | CTATGGGGTAAAAATGCAATAGG | 5875 |
| hs132680485 | AATGATTTTGGGGCTCATAATGG | 5876 |
| hs132682941 | AGTAAACATATATCTCTGATAGG | 5877 |
| hs132681745 | TTAGAATTTGTTTTTACTGTGGG | 5878 |
| hs132682806 | GGTTTACTGACTTAGATGATAGG | 5879 |
| hs132680295 | GTCTTTATCTCAATGCCATTAGG | 5880 |
| hs132681065 | AGGACCTATGAGAGATACTTTGG | 5881 |
| hs132680241 | ACTTCTGGCTCCCTTCCCTCAGG | 5882 |
| hs132680437 | TGATAACCCCTTTAGCAAACTGG | 5883 |
| hs132679197 | GGTCATATGGTCCCAATATAGGG | 5884 |
| hs132680761 | AATTCCATATGCCTAGTCTAAGG | 5885 |
| hs132680228 | ACATGGTTTATGAAAGAAATGGG | 5886 |
| hs132681632 | AGATGTAGACGTTATCTATAGGG | 5887 |
| hs132682071 | TGCTTCCAGTTTAAAAAAAACGG | 5888 |
| hs132682693 | ATAAGCTAGACTATTAAGATTGG | 5889 |
| hs132678716 | GATAAATTCAGCTTATGTTAAGG | 5890 |
| hs132679219 | GAGGGACTGTACTAATTTGTAGG | 5891 |
| hs132681264 | AAAAGCATAGGACTACAAAATGG | 5892 |
| hs132681576 | ACCATCGCCATCATTGACTATGG | 5893 |
| hs132678309 | GCTAATCTGTTCAGAGTCATAGG | 5894 |
| hs132678251 | AGTTCCCACTAGGAAATAGTAGG | 5895 |
| hs132681502 | GGCAGTGCCTATTCACTAACTGG | 5896 |
| hs132678332 | TCATTTCTCTTCAAAGCCTTAGG | 5897 |
| hs132679755 | GTCCTCAATCAAACACTAGATGG | 5898 |
| hs132682680 | CACAGACCAGAAACAGAAATTGG | 5899 |
| hs132680416 | GTATATAAGGGAATCATTACAGG | 5900 |
| hs132677301 | CTGAAACGTATTGATCCCTTTGG | 5901 |
| hs132680741 | TTACATGGCATCCAGAGAACAGG | 5902 |
| hs132682082 | ACACATTACCAATTTTAAATGGG | 5903 |
| hs132680769 | TCATAATATTTAGTTGATAAGGG | 5904 |
| hs132679639 | GGTTGGTGATCTTTGTTGTATGG | 5905 |
| hs132682889 | GAAAGACTCTGTAGGTCAATTGG | 5906 |
| hs132678598 | CTAACAACATTAGAATCATTAGG | 5907 |
| hs132681816 | TGTCAATGTTTCCATACCTTGGG | 5908 |
| hs132682570 | TTTTTATATTTGTTGTTAGTGGG | 5909 |
| hs132677122 | TTTTAATCGTGGAAGTTTAAGGG | 5910 |
| hs132679724 | GTAAATAAAATATAACAAATCGG | 5911 |
| hs132677634 | GAAGACACTGAAGAAAGAATAGG | 5912 |
| hs132682867 | GCAGAGTATGGTTTTTAAAAGGG | 5913 |
| hs132680807 | TTTTAATCTGAAGAAATCCTTGG | 5914 |
| hs132682226 | TTTATGTCATTGGTTTTGCCTGG | 5915 |
| hs132679727 | GGAACCTAGGAAATAGGAATTGG | 5916 |
| hs132679596 | TTTCTACTCTAAATTGAGTCAGG | 5917 |
| hs132681299 | GATCTGGCTTAATAATATATAGG | 5918 |
| hs132680472 | ATAGATTTCTGGAGTAAAACAGG | 5919 |
| hs132683221 | ATAACCATCTTATAAATATTCGG | 5920 |
| hs132677379 | AATAGAGTAACATACATATTGGG | 5921 |
| hs132679988 | TAATGTAGCGAAGGGTACTATGG | 5922 |
| hs132683216 | GAAGATCTATTTCAACTTGCGGG | 5923 |
| hs132681930 | GCTGTTGTAAAGGAGATTACAGG | 5924 |
| hs132680572 | TCTTAACTAATCACATTGCTTGG | 5925 |
| hs132679637 | CTATTCAGAAGAAGAAAAAATGG | 5926 |
| hs132680420 | TTAGCATATTAACTCCTTTGAGG | 5927 |
| hs132679113 | GCTTTACATTATAAATTGTATGG | 5928 |
| hs132678710 | AATAAGTAGGCGAAACCATTTGG | 5929 |
| hs132677346 | TCCAGGTGATAACATTTAACAGG | 5930 |
| hs132682391 | TATTCTGTTCCTTAGCCTAAAGG | 5931 |
| hs132678030 | TTGTTTTGCTTTACTTTGGTAGG | 5932 |
| hs132680024 | GAACATTTATATCCCTAATAGGG | 5933 |
| hs132681214 | TCAATAGGATTTTCTCAGAATGG | 5934 |
| hs132679038 | CCAAAAGATGAAAATATGTTTGG | 5935 |
| hs132682904 | GCAAGTACTTGATTTAAATTGGG | 5936 |
| hs132678525 | TCTCTTTCTGCGAGGACCTATGG | 5937 |
| hs132681100 | TGACAGATATTGTGATTTAAGGG | 5938 |
| hs132681391 | AGAGAAGAGAGGAGTCCTATAGG | 5939 |
| hs132679303 | AGTCTGTCTTTAGCACTAACCGG | 5940 |
| hs132679831 | TTGAAAGGAATTCTGCAGATAGG | 5941 |
| hs132677651 | TCTTAAGTATGGGGAGGGCGGGG | 5942 |
| hs132681751 | GCTTACTGTCTACTTTTTCAGGG | 5943 |
| hs132678133 | AACTGTATGAAAGAGCCTATTGG | 5944 |
| hs132678439 | TGGAGTCTTGTTGCATTCCTGGG | 5945 |
| hs132683190 | TTAGACACTTTTGAAGAAGATGG | 5946 |
| hs132677314 | GACCAGCTCCCAGAAAAATAAGG | 5947 |
| hs132682707 | AGTAGAATAGAAAGATATATAGG | 5948 |
| hs132678559 | CACTGTTTATGATGGATTAAGGG | 5949 |
| hs132677733 | ATTCATTTTAAAACTCTTAGTGG | 5950 |
| hs132679101 | GGCTTCTTCTTTGGGCTGTAGGG | 5951 |
| hs132680370 | TCACAAAGTTTCCCAGAAACAGG | 5952 |
| hs132682735 | GTGTGCCCATTCTTCCTAATAGG | 5953 |
| hs132679828 | AGAGGGTGCAGAGAGCTAAAAGG | 5954 |
| hs132678183 | CCTCCTGCACACCAAAGTTTAGG | 5955 |
| hs132681481 | GCAGGGACAATGATGCAAATTGG | 5956 |
| hs132678905 | CTGCAAGACAAGCAAAATATAGG | 5957 |
| hs132677040 | CTTTTTTCATCCGTCATCTTCGG | 5958 |
| hs132680139 | AATGAGATTTTGTAACCATAAGG | 5959 |
| hs132678648 | CTGCTTTTCAGGAAGTAACTTGG | 5960 |
| hs132680577 | AGAATAGGATGGTTTGTAAAGGG | 5961 |
| hs132678087 | TTTTTTTTTAATCAGCCAATAGG | 5962 |
| hs132677600 | GCACCAATCTTTTAAAAAGTTGG | 5963 |
| hs132679916 | GTTCTTTCTTTGGGGATATGAGG | 5964 |
| hs132680711 | TTTCTCCTAAAACATCTTCCTGG | 5965 |
| hs132681381 | GGAGAGTGAGAACGAGGATGAGG | 5966 |
| hs132682322 | CTTCCTGAGCTTGAAATGAATGG | 5967 |
| hs132678855 | GCTGAGGTTGAGAGCTTTCAAGG | 5968 |
| hs132678931 | AGAAGTTCAAAACAAGGCTTTGG | 5969 |
| hs132678223 | AGGAAAATTCCAAAGTTAAAGGG | 5970 |
| hs132682213 | GAATAATCTTTCCAAATAAAGGG | 5971 |
| hs132678868 | CCTGATGCTTTTGCAATAAAGGG | 5972 |
| hs132681659 | AGCCACATATAGTTGACATTTGG | 5973 |
| hs132678085 | TACTGGTTCCTGAACTCAATTGG | 5974 |
| hs132681197 | CAGCTACAAGACAACCTTGTAGG | 5975 |
| hs132679746 | GCACTGACTCATGGTTTAAAGGG | 5976 |
| hs132677302 | ATGACCTTCTGATTACAAAAAGG | 5977 |
| hs132677583 | TAGGTACCTGACATTTCAATAGG | 5978 |
| hs132680078 | CTTTTAATCCAGATACTTAGTGG | 5979 |
| hs132677935 | GATGCAGAATCAGTCTTAAGAGG | 5980 |
| hs132682189 | TTAAAACAATGCCATTATAGTGG | 5981 |
| hs132678574 | TTCTTACCAAAGAAACAAAAAGG | 5982 |
| hs132678378 | CTGCCCACCAAGAAGCTATAAGG | 5983 |
| hs132680624 | TGATAGCTTTGATTTTCAATAGG | 5984 |
| hs132680304 | TGTAATGTCCTTAACTCTTAGGG | 5985 |
| hs132682051 | ATGCTTTGTGTGTTGTTGCTAGG | 5986 |
| hs132683133 | GAATTAATCTTATCTAGAAATGG | 5987 |
| hs132677459 | TACTTCTGTGTACTTTTTGTGGG | 5988 |
| hs132681571 | GTTTAAAACTGTAGTATAAAGGG | 5989 |
| hs132678916 | TTTATAGCCCTTTCTTTTGAGGG | 5990 |
| hs132678406 | TATTAATATTCCCAATTGAATGG | 5991 |
| hs132677243 | CTGTGGGAGTGCAAGTCAATAGG | 5992 |
| hs132679803 | AGGAGGCTAGCTAACATAATAGG | 5993 |
| hs132683048 | ATTGGCATACAGAGTGTAATAGG | 5994 |
| hs132683084 | GGTTGTCTCAGCACAACATTTGG | 5995 |
| hs132678037 | AGTGGTATGGTACCATAAAAAGG | 5996 |
| hs132678134 | ATAAATACTTAGTGTCCAATAGG | 5997 |
| hs132682762 | TATTAATTATTTGAATGCTTTGG | 5998 |
| hs132678379 | GGATATTAACATTTTTTAAAGGG | 5999 |
| hs132682763 | TGAATGAGAAAGGTATCATTTGG | 6000 |
| hs132678186 | CTCAATGTCTTCCTAAACTTTGG | 6001 |
| hs132679485 | ACTAAGGAAAACAGGCTATAGGG | 6002 |
| hs132682662 | TATAGTTTATAGGCTAATAATGG | 6003 |
| hs132683051 | CTACCTTCTTGGCATCAAACAGG | 6004 |
| hs132680066 | TTTGTTTCCTCTACTGCAAATGG | 6005 |
| hs132680515 | ATTCATTTCCCAAGGCTCATTGG | 6006 |
| hs132679871 | AATCATCCATGTAGGACAATAGG | 6007 |
| hs132683250 | GAGACATCAAATCTAGATAATGG | 6008 |
| hs132679753 | AAAGCAGTACATATGCAAAAAGG | 6009 |
| hs132679722 | TAAAAAATAAAAGAGCTAAAAGG | 6010 |
| hs132679199 | TTTCTTTGTGGAAGGTCATATGG | 6011 |
| hs132678966 | TAGTATTCTGCCAAAATAAAGGG | 6012 |
| hs132678031 | ATAATCTTTTCCAGTTCAACAGG | 6013 |
| hs132679271 | TATGAGGTAGAGAGGGATTTGGG | 6014 |
| hs132679432 | GTATTGTTCAATCATTTTGCAGG | 6015 |
| hs132679726 | CATTCCAATTCCTATTTCCTAGG | 6016 |
| hs132680726 | GCTAAAACCCCTCTTGGCCTTGG | 6017 |
| hs132678405 | AATTGAATGGAAGAAGTAAAAGG | 6018 |
| hs132683011 | GTGGCTTGCTCACAGTAAATAGG | 6019 |
| hs132682658 | TCACAGCTAGTAATGTAAAATGG | 6020 |
| hs132678881 | TTACACCCCTAGGGTATAATAGG | 6021 |
| hs132677703 | TAGCAACCTTTAAATTTAAAGGG | 6022 |
| hs132679705 | ATAGTCTTCTCAATTCTATCTGG | 6023 |
| hs132678955 | GTTAAGAAGCCTTAGTTCAATGG | 6024 |
| hs132681568 | CATTTTATAGCTTTATAGATAGG | 6025 |
| hs132678805 | GAATTACCCAAAAATATAAAAGG | 6026 |
| hs132682131 | ATTGCTATAGTTAAGAGTTTGGG | 6027 |
| hs132680734 | GCCTCCTCTTTGAATAAATCAGG | 6028 |
| hs132680424 | ATCAGAGTCCCGGTAGAAACTGG | 6029 |
| hs132681269 | GTTGTCTTGGATACATTAAATGG | 6030 |
| hs132682020 | TTTGTCTCTAAATAAGGTTTAGG | 6031 |
| hs132678339 | TGTTTTATAATTCTCCAATAGGG | 6032 |
| hs132683122 | TGTTTGAGAAAAAATTTTATGGG | 6033 |
| hs132682337 | CATGGAAGACTCAAGTTATACGG | 6034 |
| hs132679643 | TCATTTCCAGAAAGACAATATGG | 6035 |
| hs132677504 | TATAGTATCTGGAAGCAAATAGG | 6036 |
| hs132681323 | GGGCTCCTGACGCTTCTTGCAGG | 6037 |
| hs132680035 | TAACTGGTACGTCTCCTTATAGG | 6038 |
| hs132682049 | CAGTTTATCTTTCCAGTAAGAGG | 6039 |
| hs132677472 | ATAAAATTGCTCCTAATTGTAGG | 6040 |
| hs132678494 | GGGGCATCTCAGTCCTAAATTGG | 6041 |
| hs132683160 | TTTTAGAGCTTTCTTCATAAAGG | 6042 |
| hs132681592 | CTTTTTTCCTATTATTTACTGGG | 6043 |
| hs132677198 | GAGAGGGAGTAAAGGATTATAGG | 6044 |
| hs132681760 | CAGTCTCAGGACAAGTAGATAGG | 6045 |
| hs132680739 | TTACTCATCACCCTGTTCTCTGG | 6046 |
| hs132679245 | TCATTGAATTAATCACTAATAGG | 6047 |
| hs132681429 | TTGCAGCTCCTCATATTTGATGG | 6048 |
| hs132678274 | TCATTTCCTGCCTACCTGATTGG | 6049 |
| hs132682062 | TTTTTATTATATCTGCACTATGG | 6050 |
| hs132682342 | TCCATGAGAACCAAAACTATTGG | 6051 |
| hs132681185 | GGACTCTTCTCATCCAATTCCGG | 6052 |
| hs132679442 | GGAGCACAGCCTTTTGAAACTGG | 6053 |
| hs132678512 | ATTGTTGTCTGATTTATTACCGG | 6054 |
| hs132682388 | TGGCCCTACAGCTAAGAAAATGG | 6055 |
| hs132680242 | ATATCTCTAGTCTCTACTTCTGG | 6056 |
| hs132683188 | TGAAGAAGATGGGAATTTAGAGG | 6057 |
| hs132679332 | TCTGAAATCATATTTCGATTTGG | 6058 |
| hs132677075 | ATCTTACATGAGATACTTAGAGG | 6059 |
| hs132681967 | CTTGTACTATGAAGGATACTTGG | 6060 |
| hs132679335 | GTTTTGTTTTTATTCCAAATAGG | 6061 |
| hs132683082 | GCTGAGACAACCTACTTAAATGG | 6062 |
| hs132682163 | TTAATTGTTGAAACCTATAAAGG | 6063 |
| hs132679574 | GTATTATTCTTCCACATAATGGG | 6064 |
| hs132680392 | GCAGTGGCAGACTAGCTTTTGGG | 6065 |
| hs132682412 | TTGTCTCCTGAAATAATAATAGG | 6066 |
| hs132682925 | ATAGACATAGAGACCTAAAATGG | 6067 |
| hs132683245 | TCTTAAAGCCTTGGGTTTAAGGG | 6068 |
| hs132679553 | TCCCATGTCCCCCCAACTTTGGG | 6069 |
| hs132682963 | TCTTGACAATTCCTTTTAGAAGG | 6070 |
| hs132677728 | TTCAAGGTATGATCTTAAAAAGG | 6071 |
| hs132679854 | TTACTTTTGTAATTTAATAAGGG | 6072 |
| hs132682030 | ATAGCTCTTAGTAAATAGTATGG | 6073 |
| hs132682985 | CCAAAATGCAACCATTGTTTAGG | 6074 |
| hs132683212 | GCTTTGATTTCTATATTAACAGG | 6075 |
| hs132682023 | CTAGTGAGATGCTCATTAACTGG | 6076 |
| hs132678889 | CCTATAGATTAGAAAAAAATCGG | 6077 |
| hs132677252 | CCAGTTTTAGTAATTGTATAGGG | 6078 |
| hs132678080 | GGTCATGTCAAACTACTTACTGG | 6079 |
| hs132679221 | AATCAATCGGCCAAGCAAAATGG | 6080 |
| hs132680598 | TGTGTTCTCTAACTATGATTAGG | 6081 |
| hs132680073 | TTTGATATCCTCAGTAACTATGG | 6082 |
| hs132677096 | GCAAAGAAAATATTCCTAAAAGG | 6083 |
| hs132678248 | TCAAGACTAGTCTTAGTATAGGG | 6084 |
| hs132680299 | CCAAGCCGCAGAAATAAATTAGG | 6085 |
| hs132680965 | GGATTATATGAATAATGCTTTGG | 6086 |
| hs132680042 | TCTCAGACATTACAAACTTTAGG | 6087 |
| hs132680097 | GCCTGACTATCGTAAATTTAGGG | 6088 |
| hs132681394 | TATTTCCCAAATTATCCTATAGG | 6089 |
| hs132678965 | ATAGTATTCTGCCAAAATAAAGG | 6090 |
| hs132678957 | GGGAAGACTAATTAAAAAAATGG | 6091 |
| hs132681593 | GAAGAAACCCAGTAAATAATAGG | 6092 |
| hs132680333 | TTAGTATTACCGGTTGTCTAAGG | 6093 |
| hs132680816 | AATGTATTCTTAACAAGCTTTGG | 6094 |
| hs132683131 | GTATACACGAGGCTTTTTAAAGG | 6095 |
| hs132679869 | CTTTATCTATGCTTTGCTATAGG | 6096 |
| hs132681674 | TCTGTGCCTTGATTAAAAAAAGG | 6097 |
| hs132681888 | TTTCTGTTGCCAATTTATAATGG | 6098 |
| hs132683146 | GCTACGGAAGGGATATTTAAAGG | 6099 |
| hs132683234 | GATCTCCTAGTGGATTGTTTTGG | 6100 |
| hs132681807 | TTGCCCATCGTTATGTTTAGTGG | 6101 |
| hs132682450 | TTTTTGGTACGCTTTCAAACTGG | 6102 |
| hs132682906 | ATTGATTCTCAACTGGAAAAAGG | 6103 |
| hs132677039 | CGAAGATGACGGATGAAAAAAGG | 6104 |
| hs132682203 | TCTTATTTCAGTGAACTAAAAGG | 6105 |
| hs132681456 | AGTTTCCCCTTGCTGCTTCATGG | 6106 |
| hs132677453 | CATAAAGTTGGACCACTAAAAGG | 6107 |
| hs132677435 | GGTGGAGGATGGGAATAATTAGG | 6108 |
| hs132679355 | AATCATATGTAGTCATTCTATGG | 6109 |
| hs132678219 | ATATTTTTTCCCTTTAACTTTGG | 6110 |
| hs132678014 | GCAGAGGTTGTCTAACCTTTTGG | 6111 |
| hs132681475 | GATAGAGGTGAGAAAGGTTCTGG | 6112 |
| hs132681329 | GAATTATTAGACACAAAAATTGG | 6113 |
| hs132679845 | GACCTACCCCCTAAGCTTTAGGG | 6114 |
| hs132682839 | GGTTTAGCTCGCTAGCTAACAGG | 6115 |
| hs132678279 | CTAATTGTTGTTAAATTGATTGG | 6116 |
| hs132682627 | GTGCAAACAGTTATATTTAATGG | 6117 |
| hs132682025 | CTAGGGGATTAATATTAATAAGG | 6118 |
| hs132681517 | AATTAGATGATGAGACAAAATGG | 6119 |
| hs132677463 | GCTTGACTATCATCACATTCAGG | 6120 |
| hs132677133 | TGAAGTACCCGGGCATTTACAGG | 6121 |
| hs132680145 | TTACAAAATACAATTCCTTATGG | 6122 |
| hs132681972 | TTCCATTTAATGCTTACTAATGG | 6123 |
| hs132681122 | ACCTTACTATATACATATAATGG | 6124 |
| hs132682310 | CCTTCCAGAAATCACTAAAATGG | 6125 |
| hs132683035 | GGTTTTACATAGATCTAAAATGG | 6126 |
| hs132679030 | TCTATAGCAAATGAAAAAAAAGG | 6127 |
| hs132678091 | TGTTGGAGCTTTCAGCCTATTGG | 6128 |
| hs132677645 | TTAAGCCTGTTTACCATTGCAGG | 6129 |
| hs132681613 | ATTCTCATATAACATGTTTTCGG | 6130 |
| hs132678155 | AAAACTTGTCACTATCAAAATGG | 6131 |
| hs132679611 | ATATCTATTGAAGATATAATTGG | 6132 |
| hs132679293 | TGAAAAGTAGGCCAGAAATTTGG | 6133 |
| hs132679084 | GTGACCACTCGAACATTTACAGG | 6134 |
| hs132678359 | AATAAATTCATCTAATAAAAAGG | 6135 |
| hs132679024 | TTGTATATAAAAAGTTAAATAGG | 6136 |
| hs132682726 | CTACAATGTGACTTTCTAAATGG | 6137 |
| hs132681580 | CTCATTCTCCTACTACTCTTTGG | 6138 |
| hs132678179 | TCCATACTATACACATAATATGG | 6139 |
| hs132683173 | GTTTTTGGTTAATTGATAAATGG | 6140 |
| hs132677381 | TGTGCATTCGAACTTTAAATAGG | 6141 |
| hs132679191 | GCAGTAGTTGACATTAAAAATGG | 6142 |
| hs132682544 | CAGAATAGTTGGGAACTAAATGG | 6143 |
| hs132677612 | ACTTAAAGTTACATCAAAAATGG | 6144 |
| hs132677212 | TGAATATGACTAATAGAAATTGG | 6145 |
| hs132681658 | GGAAGAATTTGACAGAAATATGG | 6146 |
| hs132678208 | TGATTTCCTTGGGTTCCTTTTGG | 6147 |
| hs132681604 | GTTTTTTTCCCTGAAATTTTCGG | 6148 |
| hs132682383 | CTAATAAACTAAAGTCAAATTGG | 6149 |
| hs132679409 | CTTAGAGCTCTTTCAATTATGGG | 6150 |
| hs132681418 | ATTTAGATCTAATTTGTATAGGG | 6151 |
| hs132682951 | CTAGCAACTATCATGCTAATTGG | 6152 |
| hs132677793 | TATAATTGCCATCAAATAAAAGG | 6153 |
| hs132677773 | TTTAGGGGTCAGCTTTTAAAAGG | 6154 |
| hs132679778 | CTAAAAGGCATTTTTAAATATGG | 6155 |
| hs132677602 | TGAACCTTAAATTTAAATAATGG | 6156 |
| hs132683284 | AAGTTGTGAAATTTTCAAAATGG | 6157 |
| hs132679843 | GCTTTTATGTGTTTACTTAGAGG | 6158 |
| hs132677958 | TCTGAAAGTTAGCCCTTTAGAGG | 6159 |
| hs132681023 | GCGTTTTCTACTCTTAATAAAGG | 6160 |
| hs132680912 | CTGTATTCCATCAGAAAAAATGG | 6161 |
| hs132679886 | CTATTTGCTCAACATTATTCAGG | 6162 |
| hs132679851 | TTATTTTTCTGTCAGTAAAATGG | 6163 |
| hs132682054 | AGACACTTGAATATGAAAATTGG | 6164 |
| hs132680050 | CATACCTTCCTTTACGTTATGGG | 6165 |
| hs132680875 | TTTCTGGAATGACTGATCTTAGG | 6166 |
| hs132679004 | GCTTGCACAGAATTTTTAATTGG | 6167 |
| hs132680616 | GGTGATTGCATTGATATTAAAGG | 6168 |
| hs132677795 | ATTCCTTTCCTTTTATTTGATGG | 6169 |
| hs132678600 | GGACTGTTGTCATAAGTTATAGG | 6170 |
| hs132683003 | ATTTTTGTCCCAACAATAATAGG | 6171 |
| hs132677402 | TCAGAATGTTCAATTTTATAGGG | 6172 |
| hs132677265 | CTTGAAAAGGAAGCCATTAAAGG | 6173 |
| hs132680106 | GCATAACGTTTACATCAATATGG | 6174 |
| hs132679817 | TCTCCTTCATTGTAAATTTAGGG | 6175 |
| hs132678260 | ACCACTAAAGAAAATCTTTTCGG | 6176 |
| hs132683138 | GATAGGGCTTATTTTTAAAATGG | 6177 |
| hs132682079 | TCATAACACCCATTTAAAATTGG | 6178 |
| hs132680404 | ATTATGGCACAAAAACTATTTGG | 6179 |
| hs132677532 | TATTTTTGCATGCAAATAATTGG | 6180 |
| hs132679100 | GTTCAATATAACTCATTAAATGG | 6181 |
| hs132681534 | CTTATGCTGGTCAGATTAAATGG | 6182 |
| hs132683261 | TTACCTTGAAAACTAGTATTAGG | 6183 |
| hs132681887 | TTTTAATCTCCATTATAAATTGG | 6184 |
| hs132679717 | CTATTCAACTATAAAGTAAATGG | 6185 |
| hs132677155 | ATATCTAACCTGGAATAATTTGG | 6186 |
| hs132681720 | CCAAAAGTAAACTTAAAATTAGG | 6187 |
| hs132683203 | GTTAGAGGATGCAAATATTTTGG | 6188 |
| hs132678742 | CTTTCTCATTCCTACTTAATAGG | 6189 |
| hs132682053 | ATAAAATCAGTTTTTATTAAAGG | 6190 |
| hs132680340 | GATCCTTCCTTAGCTGTTAATGG | 6191 |
| hs132682465 | GTAATCAGACAACCTTAATTTGG | 6192 |
| hs132682665 | ATAACATGTTGTGTAATTATTGG | 6193 |
| hs132679340 | GATATTGGCCCTTTCTAAAAAGG | 6194 |
| hs132682811 | TGAAACATCGAATACAATTTTGG | 6195 |
| hs132682164 | TATAGGTTTCAACAATTAATTGG | 6196 |
| hs132681050 | TCTTTTTGTGGTAAGAAATATGG | 6197 |
| hs132678527 | CCTTAGACCTAGATTCTTAAAGG | 6198 |
| hs132678791 | AATCATTACCTCCAACTTAATGG | 6199 |
| hs132677774 | ATATGTGCTTTTGAGATAATTGG | 6200 |
| hs132677513 | TCATACTGTCCTAAGAAAAATGG | 6201 |
| hs132682306 | ATAGCAACCAAAATTCTTTCTGG | 6202 |
| hs132677010 | TGCCAAATGAAAATCATACGAGG | 6203 |
| hs132676914 | TCAGTCAGGGAAATGACCAGAGG | 6204 |
| hs132676992 | GATCAAGGTCTTACACTGGGGGG | 6205 |
| hs132676974 | TTAGCGTTAAGTGTTACAGGAGG | 6206 |
| hs132676981 | AGGGCAAAGATAAGAGACGAAGG | 6207 |
| hs132676896 | AATCACCAAACATTTACACATGG | 6208 |
| hs132676746 | GTAAACGAACAGAGCCTGTGAGG | 6209 |
| hs132676985 | TTATTTATGACTATAGACTGGGG | 6210 |
| hs132676819 | GGAACTACTTGAGAAAGACCAGG | 6211 |
| hs132676877 | TATCTTCTACTCCTAATGGGAGG | 6212 |
| hs132676913 | TAGATGGATTGACTCAGTCAGGG | 6213 |
| hs132677014 | TGACATCTAGTAGAATGACTAGG | 6214 |
| hs132676918 | AGACAACAGCCTCCTAACAGAGG | 6215 |
| hs132676901 | GCCAGTATAAGGTAAGCTAGTGG | 6216 |
| hs132676891 | TCTGTGATTAGGACAAACAATGG | 6217 |
| hs132676760 | TCATGCAGTAATCCCCAACTGGG | 6218 |
| hs132676860 | CCCCTATTAGAGTCTCCTTGGGG | 6219 |
| hs132676803 | TTAGGTGAGAACTTTGCAAGTGG | 6220 |
| hs132676868 | GTACCTTCCTTTTAACCCTGGGG | 6221 |
| hs132676861 | CCCCAAGGAGACTCTAATAGGGG | 6222 |
| hs132676919 | GACAACAGCCTCCTAACAGAGGG | 6223 |
| hs132676986 | TATTTATGACTATAGACTGGGGG | 6224 |
| hs132676970 | AATATATACCGAGAAAAGAGTGG | 6225 |
| hs132676940 | AATAATAACTTTAGTCAAGGGGG | 6226 |
| hs132676889 | AAGGCAAAATCCTCAGACCAGGG | 6227 |
| hs132676899 | TATAAGGTAAGCTAGTGGTAGGG | 6228 |
| hs132677009 | ATTTTTACTTTTTCTGCAGGCGG | 6229 |
| hs132676838 | TTCTTGGAGGAAAATCTAAGAGG | 6230 |
| hs132676750 | GCTAAAAACGTACCAGGCCAAGG | 6231 |
| hs132676996 | TGTTGATCAAGGTCTTACACTGG | 6232 |
| hs132676856 | GCAGTTTCTGATCCTGAAGTGGG | 6233 |
| hs132676967 | AGGTTTCTGGCAGACAGTTGGGG | 6234 |
| hs132676869 | CATCCCCAGGGTTAAAAGGAAGG | 6235 |
| hs132676958 | TGGGAGGGAAAAATTAGCAAAGG | 6236 |
| hs132676865 | AAAATAAGAAATACTCCCCAAGG | 6237 |
| hs132676833 | TTAATGTTTTGTGAAATCAAAGG | 6238 |
| hs132676991 | ATCAAGGTCTTACACTGGGGGGG | 6239 |
| hs132676989 | AAGACGATTATTTCAGTCAGGGG | 6240 |
| hs132676928 | ACGAACATTTGGAAGACACTGGG | 6241 |
| hs132676821 | GCAAATGATAAGGAGTTCTAGGG | 6242 |
| hs132676956 | GGCCTTCTGTGGAATTTGGGAGG | 6243 |
| hs132676752 | GTTTATGCTAAAAACGTACCAGG | 6244 |
| hs132676922 | TGTCCTGGCCCTCTGTTAGGAGG | 6245 |
| hs132676990 | TCAAGGTCTTACACTGGGGGGGG | 6246 |
| hs132676820 | TGATAAGGAGTTCTAGGGTGAGG | 6247 |
| hs132676754 | AAGTGTTGCCATTCTTAGAGTGG | 6248 |
| hs132676802 | ACTTTGCAAGTGGTTTGCATTGG | 6249 |
| hs132676790 | AATGGTGAGTGAGTGGAGAAGGG | 6250 |
| hs132676938 | TTATAGCTGAACTGTTTGCTGGG | 6251 |
| hs132676900 | GTATAAGGTAAGCTAGTGGTAGG | 6252 |
| hs132676816 | ATACTTTCCAGCAAAGCTCCTGG | 6253 |
| hs132676930 | TCTGTATTCGGTAACAAAGTAGG | 6254 |
| hs132676828 | AGTTACCTTGGAGAGTAAGATGG | 6255 |
| hs132676849 | GTGGCTTTGGTCTAACTACTAGG | 6256 |
| hs132676945 | ATGTGAGATTAATACTAAAACGG | 6257 |
| hs132676846 | CTATATATACACAAGAAGATTGG | 6258 |
| hs132676759 | TTCATTCTATAGCCCAGTTGGGG | 6259 |
| hs132676872 | TATTGGCTCAGGACATCCCCAGG | 6260 |
| hs132677000 | CCACATGTATAAACTCATACAGG | 6261 |
| hs132676773 | GCTCTAAACCTCAATCACTTTGG | 6262 |
| hs132676839 | CATCATTCTGACATTCTTGGAGG | 6263 |
| hs132676817 | GGAGCTTTGCTGGAAAGTATAGG | 6264 |
| hs132676851 | CATAATTGAAAGGAAATATGTGG | 6265 |
| hs132676853 | AATGTTTGAATATGATACAAAGG | 6266 |
| hs132676975 | CGTTAAGTGTTACAGGAGGCAGG | 6267 |
| hs132676948 | AGGACTTCAGAATTTAATTGAGG | 6268 |
| hs132676775 | TTAGGGAACCAAAGTGATTGAGG | 6269 |
| hs132676898 | CCTTATACTGGCCAATCTCATGG | 6270 |
| hs132676950 | CTTCAGAATTTAATTGAGGAGGG | 6271 |
| hs132676916 | GAAGTGATCACGCAGATACCTGG | 6272 |
| hs132676890 | GGGCTGACAGATCTGTGATTAGG | 6273 |
| hs132676942 | GAAATAATAACTTTAGTCAAGGG | 6274 |
| hs132676841 | TCCCACTTTCCACCAAAAAGAGG | 6275 |
| hs132676867 | AGTACCTTCCTTTTAACCCTGGG | 6276 |
| hs132676917 | TCTCCTGTGTTGCAATCCTCTGG | 6277 |
| hs132676744 | TTTCATTTCTAGTAGATTGTCGG | 6278 |
| hs132676784 | GCTAATAAGGGCTTGTAGTAAGG | 6279 |
| hs132676810 | GTAGTGCCCTGGACAAGGTCTGG | 6280 |
| hs132676785 | CTCTGGGCAATAGCTAATAAGGG | 6281 |
| hs132676876 | TAGTATACATGCCTCCCATTAGG | 6282 |
| hs132676886 | GGATCGGGAGCATTTGTTAGAGG | 6283 |
| hs132676932 | TGTAAATTGTTCACAGTCATAGG | 6284 |
| hs132676982 | ATGATTTAGCAGAATTTGATAGG | 6285 |
| hs132676879 | GATATATCTTCTACTCCTAATGG | 6286 |
| hs132676934 | TTTACATGATGACCTCAAATTGG | 6287 |
| hs132676863 | CTCCCCAAGGAGACTCTAATAGG | 6288 |
| hs132676870 | AGGACATCCCCAGGGTTAAAAGG | 6289 |
| hs132676921 | GCTGTTGTCTCTTCACTTCCAGG | 6290 |
| hs132676832 | TTTGATTTCACAAAACATTAAGG | 6291 |
| hs132676847 | TTGACAGTATACAAGTTTAATGG | 6292 |
| hs132676745 | CTTAATAGTGAAATTATAAATGG | 6293 |
| hs132676266 | AAGTTATATCTCATTCACAGGGG | 6294 |
| hs132676139 | AAAGCATTCAGATCACTAGGGGG | 6295 |
| hs132676427 | ATTTGATAGAGATTTAACTGTGG | 6296 |
| hs132676332 | TTGGAAATCCAGGTCCACAGTGG | 6297 |
| hs132676686 | ACAGGGGAAGAGTCACCAAGTGG | 6298 |
| hs132676685 | CCTCCAATGCCATGACACAGGGG | 6299 |
| hs132676568 | GCTTCATATTGCCTACCATGTGG | 6300 |
| hs132676471 | TGAGGAACAGGGTTAAACTGAGG | 6301 |
| hs132676650 | TGTAGCAGTGAAGAAAAGAGCGG | 6302 |
| hs132676220 | CATAGGACAAGAACTTAAGGGGG | 6303 |
| hs132676178 | ATGAAGACTCTAGAGGAGGGAGG | 6304 |
| hs132676403 | ATCAATTGTCTATCACAAGGTGG | 6305 |
| hs132676438 | TTACAAACAAAAGTGGGACAGGG | 6306 |
| hs132676209 | TATGTCAAAGCAAACCATGGAGG | 6307 |
| hs132676556 | ATATGTCATAAACTTGACAGTGG | 6308 |
| hs132676573 | TGTCAGAGATTACAGCCACATGG | 6309 |
| hs132676535 | TGTATAGTGAATGTATCACTTGG | 6310 |
| hs132676600 | TCTGAGCTAGAGCTTTAATGGGG | 6311 |
| hs132676477 | AGAGGGACAGGCTAAAATGGAGG | 6312 |
| hs132676173 | ATGTCTTCTTCAAACTACCAAGG | 6313 |
| hs132676460 | CTCTACAGATATAAGCTGAGTGG | 6314 |
| hs132676187 | CAGACCAGACCGTCAATGTGAGG | 6315 |
| hs132676129 | GTGTCTCACGGAAGCCCAAGGGG | 6316 |
| hs132676545 | TGGCCATTCCATAGGCTCAGGGG | 6317 |
| hs132676201 | ATTAAATAGTAGGGTCACTGTGG | 6318 |
| hs132676546 | CAGAGCTCAGTAGATCCACATGG | 6319 |
| hs132676097 | AGTGACAAGTCTTATGACAGTGG | 6320 |
| hs132676505 | TTATGAATGTGATCCAGACAAGG | 6321 |
| hs132676416 | AAATCATAAGAGGGAAGACGAGG | 6322 |
| hs132676265 | AAAGTTATATCTCATTCACAGGG | 6323 |
| hs132676229 | ACTCTACCTCCTAAATGACTGGG | 6324 |
| hs132676667 | ATAAGCTGAGCAACATTTGGGGG | 6325 |
| hs132676709 | TGAAGTAAAATCTGAAAACAGGG | 6326 |
| hs132676504 | TGAATGTGATCCAGACAAGGAGG | 6327 |
| hs132676198 | ACAACACTGATACACACAGTAGG | 6328 |
| hs132676175 | GATAACCATGAAGACTCTAGAGG | 6329 |
| hs132676527 | TTGTCTCCAGAAGAATAGGAAGG | 6330 |
| hs132676547 | TCTCCCCTGAGCCTATGGAATGG | 6331 |
| hs132676621 | AGATTTCTATATATGGCCCGTGG | 6332 |
| hs132676053 | TGGCACTCCTTGGAGCTAGGTGG | 6333 |
| hs132676318 | GTGTAAAAGCACATGCTGCAGGG | 6334 |
| hs132676551 | TCAAGTCTGAACTCTCAACAAGG | 6335 |
| hs132676525 | AGACACGCTGAGAGTCACTTCGG | 6336 |
| hs132676371 | AAAGCAAGAGGTATACTAAGGGG | 6337 |
| hs132676401 | GTAACTTCAAATCTACAATGTGG | 6338 |
| hs132676503 | GAATGTGATCCAGACAAGGAGGG | 6339 |
| hs132676651 | GATATTTCCAAAGAGTCCATCGG | 6340 |
| hs132676372 | AAGCAAGAGGTATACTAAGGGGG | 6341 |
| hs132676408 | ATAGTGTTGAAATATACCCTAGG | 6342 |
| hs132676326 | GATATATACAACCTAAACGGTGG | 6343 |
| hs132676495 | TGTGTGGACAAACTTATCACTGG | 6344 |
| hs132676126 | AGGTAGGCAACTGTGTCTCACGG | 6345 |
| hs132676415 | TAAGCAAGGAAATCATAAGAGGG | 6346 |
| hs132676593 | GGAACCTTTACCTTAGCCTGTGG | 6347 |
| hs132676492 | AAACCTATGAAAAGAAACCCTGG | 6348 |
| hs132676635 | GGGCTCCTCTAGCCCCAAAGGGG | 6349 |
| hs132676148 | GTATGCATAAGATATTGGCCAGG | 6350 |
| hs132676452 | GTGCAGTGATAACTTTATTGCGG | 6351 |
| hs132676335 | TGAAATACGGAGATAAGGAAGGG | 6352 |
| hs132676135 | GAATGAAGAAAAGTATCAGGTGG | 6353 |
| hs132676538 | GCCCTATGAAAGACACCATGTGG | 6354 |
| hs132676668 | GTTGCTCAGCTTATCTGGCAGGG | 6355 |
| hs132676443 | AGGTAAAGCAAATCCCAGCTAGG | 6356 |
| hs132676515 | GTATAAAACTACATTTGTGAAGG | 6357 |
| hs132676050 | AGTACTTCCACCTAGCTCCAAGG | 6358 |
| hs132676035 | AATCAACCTGTTAAAGAAAGGGG | 6359 |
| hs132676426 | AATACATCTTGGGGAGCGGGGGG | 6360 |
| hs132676672 | TCTTAAAATAACCATAAGCAGGG | 6361 |
| hs132676253 | AAATAAGACGTCAGAATGAGGGG | 6362 |
| hs132676197 | TGTGACAAGCACTCTATGGTTGG | 6363 |
| hs132676448 | TGGGAGACTATGCTACTAAGTGG | 6364 |
| hs132676695 | CAGTCACAGCTAAACCAAGTAGG | 6365 |
| hs132676327 | ATATATACAACCTAAACGGTGGG | 6366 |
| hs132676465 | ACAGGTTAAACGCCAGGACAGGG | 6367 |
| hs132676146 | AGGGACAGAATTGTATTCAGTGG | 6368 |
| hs132676154 | ATTGTTTCTAGGAAGGCAGGTGG | 6369 |
| hs132676080 | AAACATACTCACTCATACTGCGG | 6370 |
| hs132676232 | TCATAGCCCAGTCATTTAGGAGG | 6371 |
| hs132676693 | AAACCAAGTAGGCAGGTCAGAGG | 6372 |
| hs132676594 | TTCTGCATGAGAATGTCTTGAGG | 6373 |
| hs132676207 | TGGAGGATAGAAAACCTCCATGG | 6374 |
| hs132676113 | TGAACTTTTTGACACTGGGGGGG | 6375 |
| hs132676241 | CTTGAATAAAATATTGACGATGG | 6376 |
| hs132676128 | TGTGTCTCACGGAAGCCCAAGGG | 6377 |
| hs132676222 | ACTAGTCTGGCGATAGAAGAGGG | 6378 |
| hs132676344 | TATTCTTAACATTCTATGCGTGG | 6379 |
| hs132676210 | CATTATGTCAAAGCAAACCATGG | 6380 |
| hs132676058 | GTTAGGTCTCTAATAAACAATGG | 6381 |
| hs132676190 | AGAGAAGTTACTGTATGGCAGGG | 6382 |
| hs132676555 | TTGAGAGTACAAATAACTGTAGG | 6383 |
| hs132676512 | AAACCCATGAGAAATGGCTCAGG | 6384 |
| hs132676707 | ACAAAGTCCTGCAGTCAACTCGG | 6385 |
| hs132676238 | CCATGTTCCTGAAGGAAAGTGGG | 6386 |
| hs132676200 | TGGTTGGAAATTAAATAGTAGGG | 6387 |
| hs132676219 | GCATAGGACAAGAACTTAAGGGG | 6388 |
| hs132676073 | GATTCCTCATATGGCAGTAGAGG | 6389 |
| hs132676221 | ATGCCTTTAAAATAGACAGCAGG | 6390 |
| hs132676069 | CACTCCTCAAATGTTTAAGGTGG | 6391 |
| hs132676137 | AGAAAGCATTCAGATCACTAGGG | 6392 |
| hs132676625 | TTAAAACCTCCGAAACTCCACGG | 6393 |
| hs132676714 | TGTCTTTTCCCTTCCCTCTGTGG | 6394 |
| hs132676078 | ATCAATAGATAAATTCATAGTGG | 6395 |
| hs132676059 | TAACATTCATTCTAAAACAGAGG | 6396 |
| hs132676629 | ACTGATTATGTCTAGCCTTGTGG | 6397 |
| hs132676606 | ATAATGGCTTAAATTTGAGAAGG | 6398 |
| hs132676466 | TTAAACGCCAGGACAGGGAAAGG | 6399 |
| hs132676567 | GGGGTGAGAAGAAGAAAGCATGG | 6400 |
| hs132676678 | AAGTGCCTGGTGAAATGTATTGG | 6401 |
| hs132676094 | GTCTTATGACAGTGGATAAGGGG | 6402 |
| hs132676623 | TATGGCCCGTGGAGTTTCGGAGG | 6403 |
| hs132676076 | ATAGTGGCTTTTCCTTATGGAGG | 6404 |
| hs132676570 | CTGTAATCTCTGACACACAAAGG | 6405 |
| hs132676366 | CCTATTATGTTCACATATGGAGG | 6406 |
| hs132676597 | GGTTTTGTCCTCTAACGCATAGG | 6407 |
| hs132676624 | TAAAACCTCCGAAACTCCACGGG | 6408 |
| hs132676359 | GACTTGAGCTTAAAAAGTTGGGG | 6409 |
| hs132676430 | TTAGAACTTAGTTATATCCAAGG | 6410 |
| hs132676534 | AGTGAAGTAGGAGTGGAAAACGG | 6411 |
| hs132676674 | AGTTTATCTTTGAAAGAGAGAGG | 6412 |
| hs132676283 | GTATTTTACACTGCATATGAGGG | 6413 |
| hs132676181 | GGTATTTGTCATGCCTGAAAGGG | 6414 |
| hs132676691 | CTAATCTCCTCTGAACCACTTGG | 6415 |
| hs132676062 | CTAGACAGAGATAAGAGAGCTGG | 6416 |
| hs132676425 | TAATACATCTTGGGGAGCGGGGG | 6417 |
| hs132676162 | ATATAATCACATTTTGCAAGTGG | 6418 |
| hs132676530 | CGTGGTTTCTGGCTAATTTGGGG | 6419 |
| hs132676081 | AACATACTCACTCATACTGCGGG | 6420 |
| hs132676627 | CCTGTTGACAATCAGCGAAACGG | 6421 |
| hs132676500 | GTATGCAGTTTAAAAATGGAAGG | 6422 |
| hs132676288 | TTTTAAAATTAGCTAAGGGAGGG | 6423 |
| hs132676571 | TGTAATCTCTGACACACAAAGGG | 6424 |
| hs132676488 | TGAGTGATTTTTTTAAACCAGGG | 6425 |
| hs132676583 | ATAAATCAAAATGCTCAAGCAGG | 6426 |
| hs132676150 | CTGTTATTATAACAATTCACAGG | 6427 |
| hs132676374 | AGAGGTATACTAAGGGGGATGGG | 6428 |
| hs132676596 | TCTCATGCAGAAACCAAACTTGG | 6429 |
| hs132676590 | TCAGCCACAGGCTAAGGTAAAGG | 6430 |
| hs132676239 | TCCATGTTCCTGAAGGAAAGTGG | 6431 |
| hs132676510 | CAGCCTGAGCCATTTCTCATGGG | 6432 |
| hs132676719 | GCAAATGCATGCTGCCACAGAGG | 6433 |
| hs132676381 | TATTTTACAGGCCTATTGTGTGG | 6434 |
| hs132676716 | GCATGCTGCCACAGAGGGAAGGG | 6435 |
| hs132676424 | ATAATACATCTTGGGGAGCGGGG | 6436 |
| hs132676688 | AGAGTCACCAAGTGGTTCAGAGG | 6437 |
| hs132676677 | TTAGGGAGCTACTAAGTGCCTGG | 6438 |
| hs132676093 | AGACTTGTCACTGTGTAAGCAGG | 6439 |
| hs132676703 | AGACAGCGTTTAATAAGTGTTGG | 6440 |
| hs132676613 | TATATTTTCTGTAAGAAATGTGG | 6441 |
| hs132676684 | GCCTCCAATGCCATGACACAGGG | 6442 |
| hs132676250 | GAAAGAAGAATAGCAGACTAGGG | 6443 |
| hs132676611 | AACCTCCTAATGTTTTAGTAGGG | 6444 |
| hs132676046 | TAGATTACTGCAGATTAAAGAGG | 6445 |
| hs132676458 | CCAATTTGCATTCTTTGTGGTGG | 6446 |
| hs132676324 | TCAATACATGCATCTCTCAATGG | 6447 |
| hs132676484 | AATATTCCTTTAAAAATCAGAGG | 6448 |
| hs132676290 | TTAAAATTAGCTAAGGGAGGGGG | 6449 |
| hs132676192 | ATAAAAGAGAAGTTACTGTATGG | 6450 |
| hs132676553 | CTTGCACATCCAACTTCATAGGG | 6451 |
| hs132676608 | TTCCCTACTAAAACATTAGGAGG | 6452 |
| hs132676417 | GGAAGACGAGGACACAAGCTTGG | 6453 |
| hs132676491 | CATAGGTTTATAGAATTAGGAGG | 6454 |
| hs132676109 | AGCCCAGTACCTGAATATAGTGG | 6455 |
| hs132676368 | CTAATTTCCCTTAAAGCAAGAGG | 6456 |
| hs132676244 | CTTTTACTGTAAACCATCATGGG | 6457 |
| hs132676206 | TTATTCAAATGTAATTTTGGAGG | 6458 |
| hs132676251 | GTAAATAAGACGTCAGAATGAGG | 6459 |
| hs132676589 | TATTGTTCAGCCACAGGCTAAGG | 6460 |
| hs132676706 | GCAGTGTTTTGTGCAACAAACGG | 6461 |
| hs132676297 | AAACTTTTAAGGATATTTCAGGG | 6462 |
| hs132676615 | ATGTCATATGAATCTCTTCAGGG | 6463 |
| hs132676669 | TGTTGCTCAGCTTATCTGGCAGG | 6464 |
| hs132676682 | AGGATGTTAATAAGAAAGGAAGG | 6465 |
| hs132676052 | TTGGAGCTAGGTGGAAGTACTGG | 6466 |
| hs132676497 | GAGATATAGAAACCAAAAACGGG | 6467 |
| hs132676226 | ATTAATATATAATCATTTCAGGG | 6468 |
| hs132676387 | GCATATAATGTTAGATAAAGAGG | 6469 |
| hs132676196 | GTGTTGTGACAAGCACTCTATGG | 6470 |
| hs132676414 | GTAAGCAAGGAAATCATAAGAGG | 6471 |
| hs132676542 | CTGAGCTCTGGCCATTCCATAGG | 6472 |
| hs132676369 | TTAAAGCAAGAGGTATACTAAGG | 6473 |
| hs132676445 | TTTTATTTACAAGTTTTTGAAGG | 6474 |
| hs132676715 | AGACATAGACCTGACCTGATAGG | 6475 |
| hs132676087 | GTTGCCATGGACCTGACTCTGGG | 6476 |
| hs132676263 | AAGCATTTGCGGTTTTAACTTGG | 6477 |
| hs132676034 | AAATCAACCTGTTAAAGAAAGGG | 6478 |
| hs132676184 | TCTTCAATGCCTCACATTGACGG | 6479 |
| hs132676394 | GGCTTTTTAAATACTCACCTTGG | 6480 |
| hs132676642 | GTACCGCATTTTCTTTATGCAGG | 6481 |
| hs132676498 | TGAGATATAGAAACCAAAAACGG | 6482 |
| hs132676578 | AATTTCCTTTTAAAATTCACAGG | 6483 |
| hs132676037 | GAAAGGGGTAAAACATTTGAAGG | 6484 |
| hs132676554 | AATAAATCTCCCTATGAAGTTGG | 6485 |
| hs132676533 | GGAGTGGAAAACGGTATAATCGG | 6486 |
| hs132676631 | TTATGTCTAGCCTTGTGGTTGGG | 6487 |
| hs132676055 | TTAATTATAATGGCACTCCTTGG | 6488 |
| hs132676698 | ATTTTTACTTGGGGTATGAATGG | 6489 |
| hs132676513 | ATATGAAAACCCATGAGAAATGG | 6490 |
| hs132676303 | CATAATAATTTTCAATGCATGGG | 6491 |
| hs132676140 | CTAGGGGGTAATTAACTGATTGG | 6492 |
| hs132676108 | ACTGGGCTCAGACCTGATAAAGG | 6493 |
| hs132676518 | TTATAATTTGTGTATGTGGCAGG | 6494 |
| hs132676581 | TTTTTTCTAAAGTTGAGCTTGGG | 6495 |
| hs132676628 | CCGTTTCGCTGATTGTCAACAGG | 6496 |
| hs132676634 | TGGGCTCCTCTAGCCCCAAAGGG | 6497 |
| hs132676526 | CTGGTTGTCTCCAGAAGAATAGG | 6498 |
| hs132676453 | AGTACTTTCTTCTCAATAAGTGG | 6499 |
| hs132676357 | TTAAAAAGTTGGGGCTATATGGG | 6500 |
| hs132676390 | CAGTGACTATTTTCAATGATGGG | 6501 |
| hs132676392 | AGTCACTGAATTAGATTGAATGG | 6502 |
| hs132676681 | TTTTAGGATGTTAATAAGAAAGG | 6503 |
| hs132676520 | CCACATACACAAATTATAAACGG | 6504 |
| hs132676089 | GGAGACTTAGATCAAGTAATAGG | 6505 |
| hs132676347 | TGATCACTCTGATACATTGCAGG | 6506 |
| hs132676559 | AATCCATGAAGAAAAATTGATGG | 6507 |
| hs132676056 | GCAGTCAGCCTTAATTATAATGG | 6508 |
| hs132676721 | GATTGTGGCTAATATAATTCAGG | 6509 |
| hs132676167 | TCTCCACAAAAAGCTTTAAGAGG | 6510 |
| hs132676622 | ATATATGGCCCGTGGAGTTTCGG | 6511 |
| hs132676189 | CAGGGTGATGATTATTTAAGAGG | 6512 |
| hs132676130 | AAGCCCAAGGGGTAAGAAAAAGG | 6513 |
| hs132676276 | TGCTTTAGTCTAATTTCAATTGG | 6514 |
| hs132676179 | TCCCTCCTCTAGAGTCTTCATGG | 6515 |
| hs132676665 | AGATAAGCTGAGCAACATTTGGG | 6516 |
| hs132676057 | TCTGTTTTAGAATGAATGTTAGG | 6517 |
| hs132676661 | GAAACTGTGCAGCAATTAATTGG | 6518 |
| hs132676552 | TCTTGCACATCCAACTTCATAGG | 6519 |
| hs132676362 | CCTCCATATGTGAACATAATAGG | 6520 |
| hs132676380 | ATAAAGTGCAAATATTTTACAGG | 6521 |
| hs132676038 | GTTTTACCCCTTTCTTTAACAGG | 6522 |
| hs132676235 | CTTTTATCCCACTTTCCTTCAGG | 6523 |
| hs132676306 | ATGTACTTCCACCATCTATTTGG | 6524 |
| hs132676587 | GTCATAAGTATAAACAAAAATGG | 6525 |
| hs132676574 | ATATACCTGTGAATTTTAAAAGG | 6526 |
| hs132676195 | CACTTCACACAGATTTTAAAAGG | 6527 |
| hs132676142 | CTAGTGATCTGAATGCTTTCTGG | 6528 |
| hs132676522 | CTTCGTCGTAAACTTGTTAAAGG | 6529 |
| hs132676386 | TTAAGTTTCTGAATACTTAAAGG | 6530 |
| hs132675817 | AAGTAGAAGCAATAACAGCGAGG | 6531 |
| hs132675963 | TAAGTGGGAGAATATCTGCAAGG | 6532 |
| hs132675764 | AAGTAATGAAAATAGAACCAAGG | 6533 |
| hs132675934 | CTACTTCACAACAGTAAGCGGGG | 6534 |
| hs132675834 | TTTAGAGACAGTGAGACCTGAGG | 6535 |
| hs132675941 | TTTGGAATAAAAATATATGGGGG | 6536 |
| hs132675797 | TTATGTACAGTGACTGCAGGAGG | 6537 |
| hs132675916 | AAGCAGTTTGGGGAGAGATGCGG | 6538 |
| hs132675880 | TAGATCTATCAGATAACGAGCGG | 6539 |
| hs132675849 | TTGGTAGGCAGGAATTTACAGGG | 6540 |
| hs132675859 | ATAACAAATCTTGCTAACAGTGG | 6541 |
| hs132675871 | GTTCAATGAGAAGTCCTCCATGG | 6542 |
| hs132675898 | AAAACAACAGGCTATAAGAGAGG | 6543 |
| hs132675986 | TAGTGGATATAAGTTCATGTTGG | 6544 |
| hs132675777 | TGAACCTTAACCTTCCCAGAAGG | 6545 |
| hs132675831 | GGTCTCACTGTCTCTAAAGGAGG | 6546 |
| hs132675977 | TGCCACTAAGATGGTAACCGTGG | 6547 |
| hs132675755 | ATAAAGAAAAAAAACAACAAAGG | 6548 |
| hs132675804 | AGCAGATAGTGGCTTAATGGTGG | 6549 |
| hs132675845 | TGTCTTGCACAGAAGTGACTTGG | 6550 |
| hs132675876 | CTATGTTATTAATAGTGCCATGG | 6551 |
| hs132675833 | GAGACAGTGAGACCTGAGGACGG | 6552 |
| hs132675931 | ACAACAGTAAGCGGGGAGAGGGG | 6553 |
| hs132675811 | TTTAACGTTATGCACATAGAGGG | 6554 |
| hs132675877 | GTATGTTGCATTAGAAAAAGGGG | 6555 |
| hs132675841 | CAGAGGAATAGAAATGAAGAGGG | 6556 |
| hs132675982 | ACGTATATATATACAATGAGTGG | 6557 |
| hs132675889 | TGCTTAATAGTTTTAGAACAGGG | 6558 |
| hs132675989 | GCAGAGGTCAAATAGACAGTCGG | 6559 |
| hs132675832 | AGACAGTGAGACCTGAGGACGGG | 6560 |
| hs132675896 | TCAAGGATATGGTGATTCAAGGG | 6561 |
| hs132675795 | GAGTAACTGACTAAATAAGTAGG | 6562 |
| hs132676020 | ACATTTGTTTCACACGTCAAGGG | 6563 |
| hs132675927 | GGCAACAAAGAATAGCTCATAGG | 6564 |
| hs132675802 | TTCCAACCGTAATTTAGCACAGG | 6565 |
| hs132675800 | GTCCTGTGCTAAATTACGGTTGG | 6566 |
| hs132675824 | ATCATTGAGCTGGTCCCCAAAGG | 6567 |
| hs132675964 | ATTTCTTATCACGATTAAGTGGG | 6568 |
| hs132675900 | GTGGAGGCGCTTTTGCAATGAGG | 6569 |
| hs132676018 | AAAAGCAGCACTATGGAGCAGGG | 6570 |
| hs132675930 | GGAGAGGGGAAGAGAAAGAGCGG | 6571 |
| hs132675984 | ATGTATATGTATACAATGAGTGG | 6572 |
| hs132676012 | CCTTAACATTTCAGACGACATGG | 6573 |
| hs132675972 | ACCATGGCCCAGAACAGGGGTGG | 6574 |
| hs132675728 | TTACATTTTTGACCTACATGTGG | 6575 |
| hs132675936 | TGCTACTTCACAACAGTAAGCGG | 6576 |
| hs132675738 | GAAGTTAAGTCTATTCTCAAAGG | 6577 |
| hs132675971 | GGGACCATGGCCCAGAACAGGGG | 6578 |
| hs132675892 | GAGATAAGTAAGCAGAGGCTGGG | 6579 |
| hs132675919 | GACACCATCACTATATGGAACGG | 6580 |
| hs132675787 | CTAAGCCTATTATTTAGGAGTGG | 6581 |
| hs132675935 | GCTACTTCACAACAGTAAGCGGG | 6582 |
| hs132675929 | GAGAGGGGAAGAGAAAGAGCGGG | 6583 |
| hs132676005 | TTTATTTTAATCACTACCAAAGG | 6584 |
| hs132675858 | GATTTGTTATTACAACCAGCTGG | 6585 |
| hs132675766 | CTATGAGACAATCAAATACATGG | 6586 |
| hs132675860 | ACTTGGCTCTGGCAACCAGCTGG | 6587 |
| hs132675788 | ATAATAGGCTTAGTTATCAAGGG | 6588 |
| hs132675924 | CAGCCCGTTCCATATAGTGATGG | 6589 |
| hs132675970 | AGGGACCATGGCCCAGAACAGGG | 6590 |
| hs132675961 | TGATACACCTCAAATAAAAGTGG | 6591 |
| hs132676004 | TAATCACTACCAAAGGAATGAGG | 6592 |
| hs132675854 | ACTTTTACTGGACAATTCAAGGG | 6593 |
| hs132675872 | CATTGAACTTGTGAAAACTCAGG | 6594 |
| hs132675947 | TTTTAATGAACGTGGTGGGGGGG | 6595 |
| hs132675917 | AGATGCGGTATGTTGCTTGCTGG | 6596 |
| hs132675974 | TATACCAAATGCCACTAAGATGG | 6597 |
| hs132675882 | TAATCTTTGCTGAAATTCAAGGG | 6598 |
| hs132675905 | TGGACTAGTTCAGATGGAGTTGG | 6599 |
| hs132675816 | AAGCAATAACAGCGAGGCTGAGG | 6600 |
| hs132675807 | TGAATCACATTCATCATTGGAGG | 6601 |
| hs132675956 | TGACTGCTGTTTTTACTGGTCGG | 6602 |
| hs132675783 | AATAAAAAGATGACTAACATTGG | 6603 |
| hs132675830 | TCAGGTCTCACTGTCTCTAAAGG | 6604 |
| hs132675995 | TTTTTAAGTCACCTGAGCATAGG | 6605 |
| hs132675794 | ACTAAATAAGTAGGTCAAGAAGG | 6606 |
| hs132675754 | ATATAGCTTGCGTTAAATGATGG | 6607 |
| hs132675981 | AACTTGAATTTAAACTTCCACGG | 6608 |
| hs132675759 | AGGAAATATTTATCCCTAAGAGG | 6609 |
| hs132675842 | GGAATAGAAATGAAGAGGGTAGG | 6610 |
| hs132675967 | TTTACTCTTTTGATAGTGAAGGG | 6611 |
| hs132675999 | ATAAAAGATTAGTAGAATATGGG | 6612 |
| hs132675949 | AGCCTCTCAAACTATTTTGAGGG | 6613 |
| hs132675979 | TTCCACGGTTACCATCTTAGTGG | 6614 |
| hs132675920 | ACACCATCACTATATGGAACGGG | 6615 |
| hs132675983 | CAATGAGTGGAAAATATTAGTGG | 6616 |
| hs132675911 | GCATGCTTGAGTTCTTCTGCTGG | 6617 |
| hs132675743 | CTTGTTCATTGAAAGCTAGAAGG | 6618 |
| hs132675798 | CCTGCAGTCACTGTACATAAAGG | 6619 |
| hs132675801 | CGGTTGGAATCAGCAGATAGTGG | 6620 |
| hs132675985 | CAATGAGTGGATAATATTAGTGG | 6621 |
| hs132675950 | TAGCCTCTCAAACTATTTTGAGG | 6622 |
| hs132675761 | CTACATATGTACACCTCTTAGGG | 6623 |
| hs132675965 | TATTTCTTATCACGATTAAGTGG | 6624 |
| hs132676002 | AATGAGGCTTTCTCAGTCTTGGG | 6625 |
| hs132675867 | GCATATTTTGTAACATAGGCAGG | 6626 |
| hs132675921 | ATATGGAACGGGCTGAAAATCGG | 6627 |
| hs132675799 | TTGTGTCCTGTGCTAAATTACGG | 6628 |
| hs132675770 | CTTCTTCCAGCATCTCATAAGGG | 6629 |
| hs132675739 | TTGAGAATAGACTTAACTTCTGG | 6630 |
| hs132675875 | AGTATGTTGCATTAGAAAAAGGG | 6631 |
| hs132675978 | GTTACCATCTTAGTGGCATTTGG | 6632 |
| hs132675954 | ACTTAGAATGAGTACATTGATGG | 6633 |
| hs132675973 | GCCACCCCTGTTCTGGGCCATGG | 6634 |
| hs132675775 | CTTTCCTTCTGGGAAGGTTAAGG | 6635 |
| hs132675910 | ATACAGTTCAGAGTGCCTTTTGG | 6636 |
| hs132675870 | GACAGTAGAAAAACAGTAATAGG | 6637 |
| hs132675918 | TATTTGACACCATCACTATATGG | 6638 |
| hs132675852 | TGAATTGTCCAGTAAAAGTATGG | 6639 |
| hs132675945 | ACATGGCTGCTGAATTTAATAGG | 6640 |
| hs132676013 | GGATCATCACGGTATAAAATAGG | 6641 |
| hs132675790 | ATAATCCACTCCTAAATAATAGG | 6642 |
| hs132675952 | GCATCAATCTGGTTTAGTTCTGG | 6643 |
| hs132675885 | AAGGGCTTCTACCATTTAATAGG | 6644 |
| hs132676010 | ATAGGTTCTGGTACATTTACAGG | 6645 |
| hs132675781 | GGCATTTGTTAACTTCTATATGG | 6646 |
| hs132675737 | TATTATGTCTCATTACTAATTGG | 6647 |
| hs132675992 | TCTATTTGACCTCTGCAAAATGG | 6648 |
| hs132675710 | CATGATCTGGAACCATACTGGGG | 6649 |
| hs132675704 | AATGGAACGTTAGATCAATGTGG | 6650 |
| hs132675598 | GCACAATTAGGAATGTCATGAGG | 6651 |
| hs132675643 | AGCAACCTGATTTAGAACAGAGG | 6652 |
| hs132675617 | GGTCAGGGACAGATAAAACAGGG | 6653 |
| hs132675605 | TGCCAAATACAAAAAGAAGGGGG | 6654 |
| hs132675550 | AAATGGGGAAGGTAAGACAAGGG | 6655 |
| hs132675700 | ATATGTATCCCATAGAACACTGG | 6656 |
| hs132675613 | TATTTTGACAGAGAAAGAGTGGG | 6657 |
| hs132675626 | AAAACGTTAGAGAGCCAACAAGG | 6658 |
| hs132675642 | AGGTTGCTGAGTAATTCACCTGG | 6659 |
| hs132675685 | GGCAAAGTTAGAATACAACCTGG | 6660 |
| hs132675556 | GGTTAACATTAAATGCTGTGTGG | 6661 |
| hs132675675 | GTGTGTGTATTTGAGAGAGAGGG | 6662 |
| hs132675515 | GGAAGATTCTAAGTATCAAGTGG | 6663 |
| hs132675691 | GTATCAATATGTTTGACACTGGG | 6664 |
| hs132675547 | AGTAAAAAAAGGACATAGGTGGG | 6665 |
| hs132675681 | CCATCATCAGATACGTAGTGTGG | 6666 |
| hs132675635 | AGCCACATGCTTAACACTAAGGG | 6667 |
| hs132675490 | TTGTCAATGAAAATTAAGCATGG | 6668 |
| hs132675661 | GGCATAGGAAAATGGTAGAGTGG | 6669 |
| hs132675644 | AATTCACCTGGAAACCCAGTCGG | 6670 |
| hs132675532 | GGGGTATTGGAAAATATGGAGGG | 6671 |
| hs132675639 | TCAATACAGTTAGATGAGAAGGG | 6672 |
| hs132675518 | GATTCTAAGTATCAAGTGGTGGG | 6673 |
| hs132675696 | CGTGAAAGTGGTTATAGTGGAGG | 6674 |
| hs132675517 | AGATTCTAAGTATCAAGTGGTGG | 6675 |
| hs132675536 | ATAAGCTTGTTAGCTGTTAGGGG | 6676 |
| hs132675486 | CCTATTTGACTGGAATAGTGTGG | 6677 |
| hs132675578 | AATAAGGTAAGTTAAGATTGGGG | 6678 |
| hs132675603 | TCTGCCAAATACAAAAAGAAGGG | 6679 |
| hs132675507 | ATGTTTTGTAAAATCTGAAGCGG | 6680 |
| hs132675634 | GGCCCTTAGTGTTAAGCATGTGG | 6681 |
| hs132675698 | ACATTAGCGGAGCGTGAAAGTGG | 6682 |
| hs132675568 | GGGATGAAACATAATATGGCTGG | 6683 |
| hs132675572 | CACATATTATTATAACCAGCAGG | 6684 |
| hs132675597 | TGTGCCAACGACAATCGCTATGG | 6685 |
| hs132675690 | CTGGGAATCCCAGTAAATCCAGG | 6686 |
| hs132675645 | ATTCACCTGGAAACCCAGTCGGG | 6687 |
| hs132675625 | ATTGAAGTCTTCCACTTGAAGGG | 6688 |
| hs132675610 | CAGGAGAGAGTATATAAATGAGG | 6689 |
| hs132675672 | CGTTTCATTTACCCAACCCAGGG | 6690 |
| hs132675659 | TCTAGAAGCAGGATTGGCATAGG | 6691 |
| hs132675649 | TGGGGTTAATTAAATCCAGCTGG | 6692 |
| hs132675552 | GTAAAACTAACCAACTATGAAGG | 6693 |
| hs132675637 | CTTCTCATCTAACTGTATTGAGG | 6694 |
| hs132675705 | ACATTGATCTAACGTTCCATTGG | 6695 |
| hs132675627 | CTAACGTTTTTCCCTTCAAGTGG | 6696 |
| hs132675665 | TTAGGCAATGCATTTAGCCCTGG | 6697 |
| hs132675680 | CCACACTACGTATCTGATGATGG | 6698 |
| hs132675525 | ATAATTTATCCCAACAGCACTGG | 6699 |
| hs132675699 | TGTTGAAACATTAACATTAGCGG | 6700 |
| hs132675669 | CCTGGGTTGGGTAAATGAAACGG | 6701 |
| hs132675524 | GCTGAGTTTGCATAAGGTGTTGG | 6702 |
| hs132675702 | TCTTAATTAGTTCATTCCAATGG | 6703 |
| hs132675686 | AACTTTGCCGAGAATGGTGTTGG | 6704 |
| hs132675541 | TCATTTTTTTCTGTAGGCAATGG | 6705 |
| hs132675652 | TTAATTAACCCCATCCCGACTGG | 6706 |
| hs132675573 | ACTTGTACTTTGGTTCCTGCTGG | 6707 |
| hs132675561 | ATTAAAAATCTGGTGATCCTTGG | 6708 |
| hs132675574 | ACTGTCAGCTACTTGTACTTTGG | 6709 |
| hs132675501 | AATCCAAGTGCAGGAAACTATGG | 6710 |
| hs132675496 | TTAAATAGAAATATTTTAAAGGG | 6711 |
| hs132675660 | GCAGGATTGGCATAGGAAAATGG | 6712 |
| hs132675567 | CCTGGGGATGAAACATAATATGG | 6713 |
| hs132675653 | GTCAGGTGTCTTGCTCCAGCTGG | 6714 |
| hs132675531 | CCTAACAGCTAACAAGCTTATGG | 6715 |
| hs132675611 | TATACTCTCTCCTGTCATATTGG | 6716 |
| hs132675559 | GGTTGCAAGTCAATAAATTATGG | 6717 |
| hs132674283 | AGGCTTCTAAGAAGTCACTGTGG | 6718 |
| hs132672277 | AAAGAAGTTGAACCTCATGGCGG | 6719 |
| hs132673128 | TGATTAAGCCAAAATCACAGAGG | 6720 |
| hs132675048 | GACAACGGCCAAAATCAGTGTGG | 6721 |
| hs132674950 | TTCACATCACGACCTCACTGAGG | 6722 |
| hs132672183 | TAAGGTACAACTGTGTACGGGGG | 6723 |
| hs132674056 | CCACCCAGTAGATTTCCATGTGG | 6724 |
| hs132672163 | AGATTGTACATAGAAAACTGAGG | 6725 |
| hs132672089 | CTACGGATAGAAGTAGACCAAGG | 6726 |
| hs132673075 | TCACGTCTTGAAGCACCAGGTGG | 6727 |
| hs132675182 | TTTAACAAATCAGCCCCTAGGGG | 6728 |
| hs132672199 | AAGCATGATAAGAATCATGGAGG | 6729 |
| hs132672364 | TTGTTACAAGTAGAAAACAGTGG | 6730 |
| hs132673420 | GTGTAAGATTGTGTCTACAGTGG | 6731 |
| hs132672437 | GTTATACTTGATACACAGTGAGG | 6732 |
| hs132674934 | TCTGCTGTTTAACTACAGTGAGG | 6733 |
| hs132674077 | TAGCAGATCTAGCAGCTCTGGGG | 6734 |
| hs132673921 | ATATATGAGAGAAATCAACAAGG | 6735 |
| hs132674282 | TATGCATCACCTCTACCACAAGG | 6736 |
| hs132674043 | AATGAGCAGATTATATACTGGGG | 6737 |
| hs132673572 | TATGTACCTAGGACCTAATGGGG | 6738 |
| hs132672367 | TGCTTGCCTAGAGCATAACAGGG | 6739 |
| hs132673305 | TATTGGCATTCACATCCCAGTGG | 6740 |
| hs132672482 | TAACTGAAAACTGAAACCAGTGG | 6741 |
| hs132672548 | CTAAGCGTCTGCATACCTGGGGG | 6742 |
| hs132673330 | GCTCATCTGGACAATCACAAGGG | 6743 |
| hs132672280 | TTTGCCTTCAGACCGCCATGAGG | 6744 |
| hs132673242 | ACTGGACATAGCTAATCACACGG | 6745 |
| hs132673250 | GCAGATGTGTGAACATCTGGAGG | 6746 |
| hs132674112 | AAGCTGTTCATTGTGTACAGCGG | 6747 |
| hs132675207 | ATAACATCAAGAGAACACACTGG | 6748 |
| hs132672827 | TTTTTTGCTGAAACTAAACGAGG | 6749 |
| hs132674853 | TCAAACCTAAGGATGGTGGGGGG | 6750 |
| hs132675364 | GAAAACGAGACCATAAGCAGTGG | 6751 |
| hs132673156 | AGAACATCCATAATAACACAAGG | 6752 |
| hs132674072 | GCTACTCTCCTCCCTCAAAGCGG | 6753 |
| hs132673886 | ATTGCAGTAAGAGTAAATGGGGG | 6754 |
| hs132673203 | ATGTGGTTGAAATGTGACCATGG | 6755 |
| hs132674317 | TCTGTAAGATAAAAACATGGAGG | 6756 |
| hs132674407 | TATTTATATAGAGCACTAGGAGG | 6757 |
| hs132672475 | TATGTGGGATGGTGTCATGGTGG | 6758 |
| hs132672590 | CCTGATGACCAGAAACCCAGGGG | 6759 |
| hs132673370 | AACCACAGAATGCTTTACAGAGG | 6760 |
| hs132672631 | TGTGGTGCTGTAGAGATATGGGG | 6761 |
| hs132673371 | CAGACCTGCCCTTATCTTGGGGG | 6762 |
| hs132673675 | GCAGTGCAGAGGGTTTGTGGTGG | 6763 |
| hs132674316 | ACTTCTGTAAGATAAAAACATGG | 6764 |
| hs132674687 | GTAAGTGTGTGTACTATGAGGGG | 6765 |
| hs132675166 | TAATGAGAAATGCAGCCATGAGG | 6766 |
| hs132673353 | AATGCCAAGAAAAGTGACCGTGG | 6767 |
| hs132675036 | GACTACTATTAAATTAACTGGGG | 6768 |
| hs132673668 | GGTTTCCAAAACCTGACACAGGG | 6769 |
| hs132672948 | ATTTGAATATAGACCTCACATGG | 6770 |
| hs132675399 | ATACTGCAAACTAAGGACGTAGG | 6771 |
| hs132672125 | AGTGGGATAGTAATAGTTTGGGG | 6772 |
| hs132672299 | TGGCTAATCGGACTTCCCTGAGG | 6773 |
| hs132674330 | AATGGGTACAGAACACATGGTGG | 6774 |
| hs132672887 | ATAAACTATTTATGACACTGCGG | 6775 |
| hs132674526 | AGTAATGGGACTAAGACCGGAGG | 6776 |
| hs132675438 | GCCTTGAGAATTGAGAACAGAGG | 6777 |
| hs132672775 | TAGGTGTTACGAGTGTTGAGTGG | 6778 |
| hs132675212 | ACGTAAATGTTATTTCCCAGTGG | 6779 |
| hs132673682 | GTTGGAGTATACTCCCTGTGTGG | 6780 |
| hs132674626 | GTGCCAGGTAAGAAGCGTAGAGG | 6781 |
| hs132674061 | GATGCCATAAATGACTGGAGTGG | 6782 |
| hs132672889 | AAACTATTTATGACACTGCGGGG | 6783 |
| hs132673855 | ATACAGTGCAAAATACAAAGAGG | 6784 |
| hs132672219 | GTATTCTTAGGTTTTGCGGGGGG | 6785 |
| hs132672877 | ACTATGATCCATGATATGAGAGG | 6786 |
| hs132675449 | AATGAGTAACCATCCAACAGAGG | 6787 |
| hs132673633 | TTAAAGAGATTATAGCAACTGGG | 6788 |
| hs132672665 | TAAGGTGATATAAAACCTAGAGG | 6789 |
| hs132674169 | CTATTACTATGCCTATAATGCGG | 6790 |
| hs132673937 | ATATAGAAATGCATCTAAGGGGG | 6791 |
| hs132674756 | AGACGAATGTAGTATGTCTGGGG | 6792 |
| hs132672319 | TGAGCATCAACCTCCCCACAGGG | 6793 |
| hs132672208 | ACTCTGGCAAAGTTTCAGAAGGG | 6794 |
| hs132674929 | AAAAGAGACAGCCAGAAGTGGGG | 6795 |
| hs132675434 | AGTTGGAAAAGTGAAATCGGTGG | 6796 |
| hs132673980 | AGTGGAATAGTAATAGTTGGGGG | 6797 |
| hs132674255 | TAAGAAAATCGTGGTCCCAGTGG | 6798 |
| hs132672306 | CTCTTCTTTAGATTTCCCAGCGG | 6799 |
| hs132673050 | GTAGGAATAGAGCCTACCAGTGG | 6800 |
| hs132672257 | TGTTAAGAAACTCAATACAGAGG | 6801 |
| hs132673979 | GTGGAATAGTAATAGTTGGGGGG | 6802 |
| hs132674779 | TTAAATATGAAATAGTAACATGG | 6803 |
| hs132674733 | TAGGCCAGCAGTACTATGGTGGG | 6804 |
| hs132674994 | ATATCTTAAATTCCTCAGAGTGG | 6805 |
| hs132673317 | TAGGTAAGAGGAAAAATGCGAGG | 6806 |
| hs132673866 | TGGAAGGCAAGCCTGTAGAGAGG | 6807 |
| hs132674337 | TTTTGTTTAGAAAGAACATGGGG | 6808 |
| hs132672555 | ATAGTTTTAGTGAGATGACAAGG | 6809 |
| hs132674488 | ACTAAGAAAGAGCACTCCAGAGG | 6810 |
| hs132674123 | CTTTAGTGTATTCATATGTGAGG | 6811 |
| hs132673403 | CCAGCTAGTAAGCACACTCAGGG | 6812 |
| hs132673077 | ACTTCACGTCTTGAAGCACCAGG | 6813 |
| hs132672584 | AGGTAGAGCTCTACTAGCAGGGG | 6814 |
| hs132672323 | TTCCTAATACAAACCCTGTGGGG | 6815 |
| hs132672881 | AGAAATTGCATATATTCCAGGGG | 6816 |
| hs132672186 | ATAGGCATTTCCAAAGACTGTGG | 6817 |
| hs132672615 | GGAAAGCTTTCCTAATCAAGGGG | 6818 |
| hs132674392 | TATTTTGGAGAGTCATCACAGGG | 6819 |
| hs132673209 | CTTCTCTTAAGATTCCACAATGG | 6820 |
| hs132674519 | AATGGCCTGCTAAAGGGCAAGGG | 6821 |
| hs132675183 | ATAATTTCTATCTCCCCTAGGGG | 6822 |
| hs132672426 | GCTTAAGTGATTGTCACCTGCGG | 6823 |
| hs132672486 | TATTTTCTAAGCACTACTGGAGG | 6824 |
| hs132673012 | CTATATGACCATGGTCCAGGAGG | 6825 |
| hs132674195 | GAGTATGATCTTCTATAACACGG | 6826 |
| hs132672749 | ATATGTTGCCAAGAAATCAGAGG | 6827 |
| hs132674840 | TCAAAAAGGTTAAGAACCCGAGG | 6828 |
| hs132673006 | GTAAAAACGTTGTCTCAGCAGGG | 6829 |
| hs132672657 | GTAGGAGTGTTATCATACTGAGG | 6830 |
| hs132673342 | TTCTGAAAATCATAAAGACAGGG | 6831 |
| hs132673603 | CATTGCATACCATTTAGCTGGGG | 6832 |
| hs132674331 | ATGGGTACAGAACACATGGTGGG | 6833 |
| hs132673051 | TAGGAATAGAGCCTACCAGTGGG | 6834 |
| hs132675041 | TTTGTCCTATGTGACAACAATGG | 6835 |
| hs132675211 | AGTGGCCTAAAAGTTAGAAGAGG | 6836 |
| hs132673560 | AGTTAGTACCCATAGAGGTGAGG | 6837 |
| hs132673314 | CCACCAGCTGAGTCTATCTGTGG | 6838 |
| hs132673218 | TATTGTCACATAAATAAGAGAGG | 6839 |
| hs132674221 | GTAAAACTAAGAAACGTCAGTGG | 6840 |
| hs132672065 | AGTCAGATCAACTTAATGTGCGG | 6841 |
| hs132673519 | TGTTTGGGACAGCTACTCCAGGG | 6842 |
| hs132673885 | TTGCAGTAAGAGTAAATGGGGGG | 6843 |
| hs132673000 | TTTTTAACAAAAACTTACAAGGG | 6844 |
| hs132674707 | TATGCTAAAACATATACCTGTGG | 6845 |
| hs132672972 | AACTGAAGAAGGCCTGACGTTGG | 6846 |
| hs132673380 | AAATAGTATTGAGTGATGGGTGG | 6847 |
| hs132672448 | ATGGTATAAGGGCAGTCCTGGGG | 6848 |
| hs132674527 | GTAATGGGACTAAGACCGGAGGG | 6849 |
| hs132672990 | AAGCTGAATGATTCTCCAAGAGG | 6850 |
| hs132672383 | AGCAGGGATACAGTGGCAAGTGG | 6851 |
| hs132672191 | AACTGACAATAAAACAAAGGAGG | 6852 |
| hs132672531 | ATTCTTAACTCACAAGAGAGTGG | 6853 |
| hs132672518 | TGTCTTACTCTACATTCAGGGGG | 6854 |
| hs132672553 | TAAAACTATGAGTCAGCGGTGGG | 6855 |
| hs132672054 | TTCTTTACTGAGAACCAAAGCGG | 6856 |
| hs132674340 | TCTTCAAACACTAATTGTGGTGG | 6857 |
| hs132673530 | TGACTATTCATGTGACACAAAGG | 6858 |
| hs132672607 | CCAAGATCAGAGCCCATATGGGG | 6859 |
| hs132673946 | TTTCACTGCTCAGCAATATGCGG | 6860 |
| hs132672496 | TTGGGAGGTCCTAATTACAATGG | 6861 |
| hs132672845 | CATGTAGCTCACATATCCCATGG | 6862 |
| hs132674262 | TCATAAATAAAACTATCTGGTGG | 6863 |
| hs132672410 | TAAACTTAGGACAATTGTGACGG | 6864 |
| hs132672218 | TACGCTCCTTTCAGAGACTGTGG | 6865 |
| hs132675261 | ACTTCCTGAGAATGGTGACACGG | 6866 |
| hs132672586 | GCTAGTAGAGCTCTACCTGAGGG | 6867 |
| hs132673738 | TGGGAGACAAGCAGATACATGGG | 6868 |
| hs132673526 | GGCCTGCATCAGAGTCATCAGGG | 6869 |
| hs132674251 | TTAGAAATTATAATCCCACTGGG | 6870 |
| hs132673304 | ATTGGCATTCACATCCCAGTGGG | 6871 |
| hs132672463 | ATTCCTAAGGAAGAAACGAGTGG | 6872 |
| hs132672283 | AGAATGAGGTTAAGGTACCATGG | 6873 |
| hs132672697 | AGTACATAAATAAAGACATGAGG | 6874 |
| hs132672175 | GAAAACTTGAGAGAAATAGGAGG | 6875 |
| hs132674671 | GAACTGATAACAATGTTGCTCGG | 6876 |
| hs132675089 | AATTAGTAACAAGATGAGAGAGG | 6877 |
| hs132675340 | TGGTGGTTTCCCTAACACAATGG | 6878 |
| hs132674013 | TATGAATTATGGTTGCAGGAGGG | 6879 |
| hs132674843 | AATTGGCCTATAATACACCTCGG | 6880 |
| hs132674256 | ATTCTATGTTAAGAAAATCGTGG | 6881 |
| hs132672835 | TTGTCTAGGCCCTTACCAAGAGG | 6882 |
| hs132673015 | TAAGTATACCTCCTGGACCATGG | 6883 |
| hs132673985 | CATCTCCACATACATAGCAGTGG | 6884 |
| hs132673865 | ACTGAACTCTTAGAGAGCAGTGG | 6885 |
| hs132675055 | GCATGTGGAAATCTGTATGTTGG | 6886 |
| hs132672519 | GTGTCTTACTCTACATTCAGGGG | 6887 |
| hs132673920 | TATATGAGAGAAATCAACAAGGG | 6888 |
| hs132674037 | AAATCCCTGGATAGGCCAGGTGG | 6889 |
| hs132675397 | TGTTTTCTCTTAGTTCAGTGAGG | 6890 |
| hs132673497 | GAATCATAGACATACTTCAAGGG | 6891 |
| hs132674894 | AGACTAAGAATAAAAAGTAGGGG | 6892 |
| hs132673049 | GCCATGAGCAGAAAAAGAGTAGG | 6893 |
| hs132674463 | GACTCTTGCTTGATATAGGGGGG | 6894 |
| hs132674070 | TAGCACTCCTCAGTACTACCAGG | 6895 |
| hs132673010 | GCCTCTGCTCTATATGACCATGG | 6896 |
| hs132672799 | TCACATTGTTTGCCCCCATGGGG | 6897 |
| hs132675238 | GATATCAATTGGCTGAACAAGGG | 6898 |
| hs132672161 | TAGCGATGTCTTGGCAACAGTGG | 6899 |
| hs132673129 | GATTAAGCCAAAATCACAGAGGG | 6900 |
| hs132672405 | TTCCTGTTGATTAGGGCACACGG | 6901 |
| hs132674462 | TATAGGATGATCTAAGAACTCGG | 6902 |
| hs132675274 | ATGTTCTTACTTATTTACCAGGG | 6903 |
| hs132672910 | TTGATTTTACTTCAACCTAGAGG | 6904 |
| hs132672260 | AAGACAGTGACTAAAGGCAATGG | 6905 |
| hs132674032 | TCTCTTACCATAAACCCACCTGG | 6906 |
| hs132672384 | TCAATGAAGCAGGGATACAGTGG | 6907 |
| hs132674446 | TTCTTTCTACGTTTACAAGGGGG | 6908 |
| hs132674613 | ATGAATGTGCTCATGTGCATGGG | 6909 |
| hs132673232 | ACACCTTCCTATATCTGGGTAGG | 6910 |
| hs132673661 | CCTAACTTCATATGAAACACGGG | 6911 |
| hs132672164 | GATTGTACATAGAAAACTGAGGG | 6912 |
| hs132672109 | ACACAGCAGTGAATAGGCACAGG | 6913 |
| hs132674741 | AATCAAAGTGAAACATGAGAAGG | 6914 |
| hs132672282 | TGGCAGTGTAGTGCAATGACTGG | 6915 |
| hs132674991 | ATTTCTAGCAAGTCTCCTGAAGG | 6916 |
| hs132674276 | GAGCACACATCCCCTTCATGTGG | 6917 |
| hs132673731 | CATGCATTGAACCAAAACTCAGG | 6918 |
| hs132674346 | CTGGAAGACAAGCTAAGAGAGGG | 6919 |
| hs132672414 | GGTATGTAACTTCTAAACCCAGG | 6920 |
| hs132672670 | CCTTCAACTGTGGAAACCCAAGG | 6921 |
| hs132673776 | GAAAACAAGTTGGTTACAGGAGG | 6922 |
| hs132674292 | AGAAGGTAGAGCCACAACAAAGG | 6923 |
| hs132673809 | GTTTCCCAAATTGATCCACAAGG | 6924 |
| hs132672264 | ATTTTATGAAATGAGAGCAGTGG | 6925 |
| hs132672478 | ATACGCAACATCAGAATAAGGGG | 6926 |
| hs132675290 | AGCACTCTCTTAATATAGGGAGG | 6927 |
| hs132672386 | GAAGGCAATTCAATGAAGCAGGG | 6928 |
| hs132674666 | CAGTAAAATCAATAATAAAGGGG | 6929 |
| hs132674725 | CATATTACATGAAAGTGTGAGGG | 6930 |
| hs132672128 | TGGAATTCAAAACTGCCAGTAGG | 6931 |
| hs132672778 | GTAACAACAATAAAGAATTGTGG | 6932 |
| hs132674094 | AATGAAACTCTATCAACCGATGG | 6933 |
| hs132673669 | TGGTTTCCAAAACCTGACACAGG | 6934 |
| hs132673282 | GTGTACGGCACCATAGTCAAGGG | 6935 |
| hs132672325 | GTTTCCTAATACAAACCCTGTGG | 6936 |
| hs132673676 | CCACTCATAGTAAGCCACACAGG | 6937 |
| hs132674812 | GACATGGTTGATTCATGGAGCGG | 6938 |
| hs132672893 | GCCTAACGTTTACTAGATGTAGG | 6939 |
| hs132672614 | CGTTCCCATTGAGATAAGAGTGG | 6940 |
| hs132672467 | GGACCATTGGACAAACCAGATGG | 6941 |
| hs132674694 | TTACCATATAAATTACCAAGAGG | 6942 |
| hs132672724 | ATTGGTGCCTCTTTATATCGGGG | 6943 |
| hs132672431 | TTAGCGAGGAAGATAAGGGGTGG | 6944 |
| hs132674739 | ATTCTCACTTAATGTTCCAGTGG | 6945 |
| hs132674663 | GCTACTGTGCCACCTATCAGTGG | 6946 |
| hs132672173 | AGTACAGAATGGATTGCTGGAGG | 6947 |
| hs132674699 | TCTGTCGGGCATAAGAATGTCGG | 6948 |
| hs132673463 | TCTTAATAAAAGTTTTCTCGAGG | 6949 |
| hs132672295 | ATCTTGGGCAGTCAACCTCAGGG | 6950 |
| hs132674464 | GGACTCTTGCTTGATATAGGGGG | 6951 |
| hs132672651 | TATGGTCAGGACATTCACTTGGG | 6952 |
| hs132675028 | GGCAGCATCAGATTAACCTAGGG | 6953 |
| hs132674868 | TCGATAAGATGATTTTGGAGCGG | 6954 |
| hs132672355 | CAATGCTTCTCATTAAAGGACGG | 6955 |
| hs132673878 | ACAAGCCCCTTAACTGTCAGTGG | 6956 |
| hs132672251 | AATAAATGTTATGGACTTCGGGG | 6957 |
| hs132672213 | TGATGATAGCTTTAGAAGCGTGG | 6958 |
| hs132675414 | TGTATAGAAGCAATAAAAAGGGG | 6959 |
| hs132673013 | ACCATGGTCATATAGAGCAGAGG | 6960 |
| hs132673442 | ACACAGCACTCACAGAACTCAGG | 6961 |
| hs132674594 | CTGCGAAGTCCTGAATTCAGAGG | 6962 |
| hs132672730 | GTTACTCAACTAGAGAAGGTAGG | 6963 |
| hs132674874 | AGAACTACTGTATGGATCCGTGG | 6964 |
| hs132673938 | AATATAGAAATGCATCTAAGGGG | 6965 |
| hs132673811 | CAGATCTACACATAGATAGAGGG | 6966 |
| hs132673565 | TCTCCCATTGGGGACCTACGTGG | 6967 |
| hs132672220 | CGTATTCTTAGGTTTTGCGGGGG | 6968 |
| hs132674445 | TTTCTTTCTACGTTTACAAGGGG | 6969 |
| hs132672244 | TAATGTTTATAATTATGGGGTGG | 6970 |
| hs132674227 | ATTCTAAAGACAGCATCTGACGG | 6971 |
| hs132674509 | GTGCGAGTGTATCTTTCTAGGGG | 6972 |
| hs132674068 | TAATGTGCCCGCTTTGAGGGAGG | 6973 |
| hs132673758 | AAACACATTACCTGCCCACAGGG | 6974 |
| hs132674965 | AAACTAGAGCCAGAATAAGAGGG | 6975 |
| hs132675235 | TGTGATGATTACAGCAGAGGCGG | 6976 |
| hs132674051 | TTACATTGGCCATTTTTCTGGGG | 6977 |
| hs132674760 | TCTCCATGTATTGACAAGATGGG | 6978 |
| hs132672495 | GGAGGTCCTAATTACAATGGTGG | 6979 |
| hs132675336 | AAGTCTGAGACTTCAAGAGATGG | 6980 |
| hs132673974 | TTACAGTTAATAATTTCCTGAGG | 6981 |
| hs132672552 | CTAAAACTATGAGTCAGCGGTGG | 6982 |
| hs132673689 | CTATATGACAGAGTTGGCAGAGG | 6983 |
| hs132672735 | AATCATGATAGAGGATGCATGGG | 6984 |
| hs132674948 | ATCCACATATGACTCAAGGTGGG | 6985 |
| hs132672211 | ATTCTCAAACTAATTAACAATGG | 6986 |
| hs132673063 | CAACAGCAACAACAAAAGGGGGG | 6987 |
| hs132673285 | CATGACCATAGCCAAGTGTACGG | 6988 |
| hs132673253 | TAACTGACAGTGAGTGACAAAGG | 6989 |
| hs132673020 | CACGTTACATTTTAACAGTGGGG | 6990 |
| hs132672221 | GCGTATTCTTAGGTTTTGCGGGG | 6991 |
| hs132674234 | ATTGTATCAGAAATATCTAACGG | 6992 |
| hs132672524 | AAATTGAGCACTGCTTGAAGGGG | 6993 |
| hs132674127 | CATGCTCTAAACACCACTAAGGG | 6994 |
| hs132672739 | ATCAGATTATGTGGATGCAATGG | 6995 |
| hs132674848 | CCATTGCTCAAACCTAAGGATGG | 6996 |
| hs132672281 | GTCATTGCACTACACTGCCATGG | 6997 |
| hs132675234 | AAATGTGATGATTACAGCAGAGG | 6998 |
| hs132674609 | ATTGAGCAGCGATGTGCACAGGG | 6999 |
| hs132675233 | AAATGTTTATAAGTTTACACAGG | 7000 |
| hs132675467 | AAATGTGTATGCCCTATGGATGG | 7001 |
| hs132672129 | TTCCACATAATCTCAGAAGTGGG | 7002 |
| hs132674560 | TTACATCTAGGGATACAGACTGG | 7003 |
| hs132673295 | ATGCAGTGACAATATCAGAATGG | 7004 |
| hs132673485 | TTGCAAATCTGTCTAAACATGGG | 7005 |
| hs132673394 | ACTATGCTAGGCACAGGGCAGGG | 7006 |
| hs132675319 | GGGGAGAATTTTATTATTGGGGG | 7007 |
| hs132672432 | ATGTTAGCGAGGAAGATAAGGGG | 7008 |
| hs132674905 | AATGCCTCTTGATCAATCTGAGG | 7009 |
| hs132672542 | AGTGCTCTCAGACTGAGGATAGG | 7010 |
| hs132674491 | AGGTCAGACAGAATATGGATAGG | 7011 |
| hs132674726 | GCATATTACATGAAAGTGTGAGG | 7012 |
| hs132673390 | AAATATATAGAAACTATGCTAGG | 7013 |
| hs132672547 | GCTAAGCGTCTGCATACCTGGGG | 7014 |
| hs132672559 | CAATAAAGAAACAAAAACCTAGG | 7015 |
| hs132675392 | GTATAGCTCTTTATCCTCAGAGG | 7016 |
| hs132672472 | TCAGCACAAAACATTTATGTGGG | 7017 |
| hs132672210 | TCATTGAAGTGAATCCACTCTGG | 7018 |
| hs132674522 | ACTCTCTTATATTACAATCGTGG | 7019 |
| hs132674406 | ATATATTTATATAGAGCACTAGG | 7020 |
| hs132675287 | CCCCTGTGAATAACAAAGTGAGG | 7021 |
| hs132673907 | CATACAGATGAAGTAAAAGAGGG | 7022 |
| hs132673756 | ATAGATGAAAAGTTCCCTGTGGG | 7023 |
| hs132675123 | AATTAGAAAAATCTTTGCAGGGG | 7024 |
| hs132675296 | GTCTTACAGAGAAATCATAACGG | 7025 |
| hs132674814 | CATGGTTGATTCATGGAGCGGGG | 7026 |
| hs132673778 | GTTGGTTACAGGAGGAAGCAGGG | 7027 |
| hs132675255 | AACAACTCAAGAGTGATGCAGGG | 7028 |
| hs132674288 | TTCATATAGCCATTGAAGAGGGG | 7029 |
| hs132675444 | ATAGGCTAGAAGAAGAGTAGAGG | 7030 |
| hs132674947 | AATCCACATATGACTCAAGGTGG | 7031 |
| hs132673709 | ACAGAAGTCACAATGATAGTGGG | 7032 |
| hs132675073 | ATTTATTTACCATTTATCCAGGG | 7033 |
| hs132675325 | TGTTTCATTATTCTCCTAAGGGG | 7034 |
| hs132673427 | GTTTCAAAATGGACTTAAGGGGG | 7035 |
| hs132672420 | GGAAGCTACTCAGTCAGCATGGG | 7036 |
| hs132675343 | TTATGGCTGCAAATAAGATGAGG | 7037 |
| hs132674938 | TGTACTCTTGCCTCTTGAGGAGG | 7038 |
| hs132672263 | TTGAGGAGTATGAAAATGATGGG | 7039 |
| hs132674631 | AATATTCCCTGAAAACAGTAGGG | 7040 |
| hs132674634 | TGAATCACAAAAGGCACGAAGGG | 7041 |
| hs132675260 | CTCAGGAAGTCAAAATAAAGGGG | 7042 |
| hs132672322 | CTAATACAAACCCTGTGGGGAGG | 7043 |
| hs132673399 | TTTGTGTGTTTATGAGGACAGGG | 7044 |
| hs132672226 | GGTCAACCACAGTCTCTGAAAGG | 7045 |
| hs132673892 | AGCAAAACGACCACAAATAGGGG | 7046 |
| hs132673237 | TCTTGTATGTGCCGAGAAGGAGG | 7047 |
| hs132673415 | ATCTTCAGGGCAGTGATGCGGGG | 7048 |
| hs132673681 | CCTGTGTGGCTTACTATGAGTGG | 7049 |
| hs132674562 | CTAGATGTAAGATTCTGACCTGG | 7050 |
| hs132674108 | TTATTTCTCCTGCATTAATGGGG | 7051 |
| hs132674058 | ATTCCACATGGAAATCTACTGGG | 7052 |
| hs132673246 | AGAATCATGACTCTTTGAGAGGG | 7053 |
| hs132673662 | GCCTAACTTCATATGAAACACGG | 7054 |
| hs132672349 | AATGTTAAAAAATTTAACATGGG | 7055 |
| hs132673130 | ACAGAGGGTTACCAGTGACTTGG | 7056 |
| hs132675297 | ACAGTACATTCTACATGCGTTGG | 7057 |
| hs132672237 | ACAAATGGTCTCCTACAACTAGG | 7058 |
| hs132673079 | AAGTAATGTGATTTAGTGTGAGG | 7059 |
| hs132674529 | GTCCCATTACTTGAAAGAAGGGG | 7060 |
| hs132673289 | CTGTTACCAAAGGGAATGGGTGG | 7061 |
| hs132674076 | TCTGGGGCAACATTCTGCAATGG | 7062 |
| hs132674088 | GTCCTGACTAGCTCTCCTGCAGG | 7063 |
| hs132674147 | TAGCATACTGTTGTTGTGTGCGG | 7064 |
| hs132672925 | AATAATATCAATGCAAGCAGAGG | 7065 |
| hs132674542 | TAAGCATTTGAGAACATCAGTGG | 7066 |
| hs132674706 | GATATACAAGAAGCTGCAGAAGG | 7067 |
| hs132672317 | TAAACAACAAAAACTGTGAGAGG | 7068 |
| hs132675194 | AATATGATATTTGTGTGTGCGGG | 7069 |
| hs132673144 | TGATGGACTTTACCTAAGGTGGG | 7070 |
| hs132673523 | AGAGTCATCAGGGAAGGTGGTGG | 7071 |
| hs132674012 | TTATGAATTATGGTTGCAGGAGG | 7072 |
| hs132675228 | TGAGAGGGTTAATTCTCAGGAGG | 7073 |
| hs132673677 | CACTCATAGTAAGCCACACAGGG | 7074 |
| hs132673414 | TAATGAGCCAATGATCCTGATGG | 7075 |
| hs132673717 | TGTAATGTACAGAGAACTGAAGG | 7076 |
| hs132672427 | AAGCAAAGCACGAAAACCGCAGG | 7077 |
| hs132672498 | TTATTGTATTTGTAGTTGGGAGG | 7078 |
| hs132673164 | AATGAATCTTTCAAAAGGAGAGG | 7079 |
| hs132673863 | GCTAGAGCTAGGAAGTGAAAGGG | 7080 |
| hs132673329 | AGCTCATCTGGACAATCACAAGG | 7081 |
| hs132674235 | GCTTTATGAAACCCACGAGTGGG | 7082 |
| hs132674835 | GCCAATAAAATACATAAGGGAGG | 7083 |
| hs132674842 | ATTGGCCTATAATACACCTCGGG | 7084 |
| hs132673204 | GTGGTACTTTCGACTGTCCATGG | 7085 |
| hs132674775 | AATACACTCAGTATTCATGTAGG | 7086 |
| hs132672771 | ATCTGGTGATAAACGTTCAGAGG | 7087 |
| hs132673627 | CTAAAGCCAAGATTTGCTGAAGG | 7088 |
| hs132672685 | TGACAAGAAATAATCTAGAGAGG | 7089 |
| hs132672583 | CAGGTAGAGCTCTACTAGCAGGG | 7090 |
| hs132673971 | CTGAGGGACTACTTTCTGAGTGG | 7091 |
| hs132672094 | TTTCAATGCACAAGGCTGAAAGG | 7092 |
| hs132673951 | GCATATTGCTGAGCAGTGAAAGG | 7093 |
| hs132672435 | TAGACTATTTTATGTTAGCGAGG | 7094 |
| hs132674214 | AGATTTACAGACACATAGTAGGG | 7095 |
| hs132675114 | TAGAAGTCTAAACAAATGCTGGG | 7096 |
| hs132672886 | GCAATCTTAACTTTCTATGGAGG | 7097 |
| hs132673496 | AGAATCATAGACATACTTCAAGG | 7098 |
| hs132673286 | GTGTAACCAGGTCATCATAGTGG | 7099 |
| hs132675129 | TTTGTCTTATGGCAATCGTGTGG | 7100 |
| hs132674481 | TGAGTTGCTGTGACAGTCTGTGG | 7101 |
| hs132673876 | TCTTGGTCGTTGAATAACAATGG | 7102 |
| hs132674851 | GCTCAAACCTAAGGATGGTGGGG | 7103 |
| hs132675052 | CCATATAGCTGCTAGGACAACGG | 7104 |
| hs132674399 | AAGCACTGATCAAGAATGAGAGG | 7105 |
| hs132672098 | GTTTGTAAGATTATTAAGGAAGG | 7106 |
| hs132673760 | AACTAAGAGCAGCCCAACACAGG | 7107 |
| hs132674320 | TTCAGGAACATGTATTCCCAAGG | 7108 |
| hs132673198 | GGAAATTATTAACAGACCAGTGG | 7109 |
| hs132674435 | CAAGATGAATCTCCTTTGGAGGG | 7110 |
| hs132674298 | CTGCTCTTATATCTTTCCAAGGG | 7111 |
| hs132672873 | TGACAGTATGGCTTGAGAGAGGG | 7112 |
| hs132674389 | TGTTGTTATGCATCTTTCAGGGG | 7113 |
| hs132674421 | TGTCAATGCCTAACTGATGAGGG | 7114 |
| hs132673943 | TTAAGCTAGGAAAGAAAGTGGGG | 7115 |
| hs132674662 | TTCATCATTCCACTGATAGGTGG | 7116 |
| hs132674444 | TTTTCTTTCTACGTTTACAAGGG | 7117 |
| hs132673960 | TTTGCATATCTGAATTTCTGAGG | 7118 |
| hs132673293 | GGTGTGTTATCTGTTACCAAAGG | 7119 |
| hs132672837 | TTAACAGCTCCTCTTGGTAAGGG | 7120 |
| hs132672550 | CTTGAATCTTTCAAACCCCCAGG | 7121 |
| hs132672743 | TCAAATAGAAAGTATTACAAAGG | 7122 |
| hs132674228 | GGAATAGAGCTATTCATCCCTGG | 7123 |
| hs132672182 | CTAAGGTACAACTGTGTACGGGG | 7124 |
| hs132674085 | CTGTTAATGGAAAGTCTGGAAGG | 7125 |
| hs132673038 | ATAAGACTAAAAGAAAGGACAGG | 7126 |
| hs132674365 | ACCAAATGTACATTTGGAGAGGG | 7127 |
| hs132673913 | CATGTTTCGAAATAGAGAAGAGG | 7128 |
| hs132673933 | TTAATCCTGTAGACAAAATGTGG | 7129 |
| hs132675099 | ACTCAAACAGTTTCCAGCAAGGG | 7130 |
| hs132675473 | CTCTACCATACTAAAAGCAGTGG | 7131 |
| hs132672878 | TCTATAATATTGTAGTCCATAGG | 7132 |
| hs132673997 | TCTGCCTAACATTTATCATGAGG | 7133 |
| hs132675224 | TGAAATACCGTATATAGAGAAGG | 7134 |
| hs132675070 | CTGTTTAGCAAAACTAACCCTGG | 7135 |
| hs132675134 | ATAGGATTTATTCCTTGCAGAGG | 7136 |
| hs132673912 | ATGTTTCGAAATAGAGAAGAGGG | 7137 |
| hs132675446 | CTGTAATCTCTACGTCTGGAAGG | 7138 |
| hs132673806 | ATACAAGATTAATCTCCTTGTGG | 7139 |
| hs132675054 | ATGTGCTCCATATAGCTGCTAGG | 7140 |
| hs132672358 | TTAATAACGATAAAAAGTAATGG | 7141 |
| hs132673586 | AGTCTAGTAAATTTGGTAGGGGG | 7142 |
| hs132673690 | AGTGATCTATATGACAGAGTTGG | 7143 |
| hs132673812 | ATAGATAGAGGGACATTCCAAGG | 7144 |
| hs132673513 | AATCTTCCCAGGCAATTCTGAGG | 7145 |
| hs132675168 | TAATGTCACTGTATAGGCCAAGG | 7146 |
| hs132672847 | CATGGGATATGTGAGCTACATGG | 7147 |
| hs132672681 | AAATCACATGAATGGTAAGAGGG | 7148 |
| hs132674787 | ACTATACACACCAAGTCTGTAGG | 7149 |
| hs132675271 | CAAATTTGACCAAAAAAGGAAGG | 7150 |
| hs132672510 | CATGCTGTACTTTACAGGCATGG | 7151 |
| hs132672228 | TCATAACATCTTAAATAAGAGGG | 7152 |
| hs132673649 | AGAAATGTACTAGGTTTCATGGG | 7153 |
| hs132672958 | TCTTATCAGACATTTCACCTTGG | 7154 |
| hs132673273 | AATGTGTGTTCCATGTCAAATGG | 7155 |
| hs132674287 | TCATATAGCCATTGAAGAGGGGG | 7156 |
| hs132672156 | GGAAGAGTATTCGGGGCAGTGGG | 7157 |
| hs132675441 | CTACCATTTCAAAATTGGCATGG | 7158 |
| hs132673280 | TGGTGCCGTACACTTGGCTATGG | 7159 |
| hs132672159 | AGAATAAACATGCAGAGGTAGGG | 7160 |
| hs132675088 | TCACTGTGTTCTGCTATCTGAGG | 7161 |
| hs132673325 | CGAAGCATGAAATATTCAGAAGG | 7162 |
| hs132674746 | GGATTACTGGAGTAGAGGCAAGG | 7163 |
| hs132675471 | ATTCATAATATAGTGCAAGAAGG | 7164 |
| hs132672298 | AGTCCGATTAGCCAGTCGCTGGG | 7165 |
| hs132672596 | GATAGTTATACCAAGCCCCTGGG | 7166 |
| hs132673135 | TTTCTAGGCATCCAATAATGTGG | 7167 |
| hs132672589 | TCCTGATGACCAGAAACCCAGGG | 7168 |
| hs132673929 | TCATTTCTAATTTTTCTCTGGGG | 7169 |
| hs132674855 | CACCCATCTGTGCAAACGTGTGG | 7170 |
| hs132675400 | CTTAGTTTGCAGTATAGGGGAGG | 7171 |
| hs132673488 | GAGAATTCCATTCCTAACCTGGG | 7172 |
| hs132672729 | TATAGTTACTCAACTAGAGAAGG | 7173 |
| hs132674751 | ACATTCACAAGCAGCAGCAAGGG | 7174 |
| hs132672696 | ATAAATAAAGACATGAGGAAAGG | 7175 |
| hs132673369 | GGTTCCCCCAAGATAAGGGCAGG | 7176 |
| hs132673498 | TTCAAGGGATCCATGAACACTGG | 7177 |
| hs132672289 | TACTCACATTGACTTTCTTGGGG | 7178 |
| hs132672876 | AGGCAGAGAATGCTCAGCAGTGG | 7179 |
| hs132674606 | GGAAAGAGCTATCTTAAGGATGG | 7180 |
| hs132672706 | ACATTACCAAGTCCTGAGAAAGG | 7181 |
| hs132673791 | AATTTCTTGTTGAGCCGGAATGG | 7182 |
| hs132674954 | ACTCTAAAATTAGATGGCAAAGG | 7183 |
| hs132674089 | GGAGAGCTAGTCAGGACTCAGGG | 7184 |
| hs132675035 | GGACTACTATTAAATTAACTGGG | 7185 |
| hs132673784 | TAATCAGCAAGCTTAATCTAGGG | 7186 |
| hs132675083 | GAATTTTTAATAATAACTAAGGG | 7187 |
| hs132674625 | AATTGTCCCATGACTGTGCCAGG | 7188 |
| hs132675132 | TCTTCAGGTTTCCCTCTGCAAGG | 7189 |
| hs132674164 | TTTAATGGTATGTATTAATGCGG | 7190 |
| hs132675426 | AGGAGATCTTTCAATATGGATGG | 7191 |
| hs132673528 | TGTGCTTTGCTCTCAAAGTGTGG | 7192 |
| hs132673054 | GTTTTAATTTTCCCACTGGTAGG | 7193 |
| hs132672841 | GCTGTGATATACTTCACATTGGG | 7194 |
| hs132675230 | TACACAGGTTAAAATTGAGAGGG | 7195 |
| hs132674483 | TCTCGCTAGCTATAAATACCAGG | 7196 |
| hs132675180 | ACTTTAACAAATCAGCCCCTAGG | 7197 |
| hs132675012 | AGAGTCAGCATTTATTCTAGAGG | 7198 |
| hs132672660 | TGTTTAATGGTCTTTCACAATGG | 7199 |
| hs132675273 | TTTTTGTTCTAAAGTTACCCTGG | 7200 |
| hs132672744 | TAATAGAGCTAAGCTTCTAGAGG | 7201 |
| hs132673587 | CAGTCTAGTAAATTTGGTAGGGG | 7202 |
| hs132673239 | GTATGTGCCGAGAAGGAGGCTGG | 7203 |
| hs132674505 | TGATAGGAACATAGGAAAGTCGG | 7204 |
| hs132672254 | TAGTGCAGTCATCATAAATGAGG | 7205 |
| hs132672279 | CGGTCTGAAGGCAAATTCAAAGG | 7206 |
| hs132675263 | GGATTAAAACCAAACCCTAACGG | 7207 |
| hs132672540 | AAATACGTTTTTGTAAAGCACGG | 7208 |
| hs132674279 | CCTTCACTTTCCACATGAAGGGG | 7209 |
| hs132674910 | AGATTAACGTGAAGAAGGCTAGG | 7210 |
| hs132675384 | TTACTGTTTTATGAAAGGATAGG | 7211 |
| hs132672345 | TGTAGACCATATCATGGCAATGG | 7212 |
| hs132673595 | TGCTGAGTCACAGTTCTCAAGGG | 7213 |
| hs132673372 | ACAGACCTGCCCTTATCTTGGGG | 7214 |
| hs132674852 | CTCAAACCTAAGGATGGTGGGGG | 7215 |
| hs132673680 | TACTATGAGTGGCAGTGCAGAGG | 7216 |
| hs132673975 | TTCTGAAGCAGAAAAATACATGG | 7217 |
| hs132674253 | AAGAAAATCGTGGTCCCAGTGGG | 7218 |
| hs132672628 | AAAATATCAAAGACAACTAACGG | 7219 |
| hs132673684 | AAGCAAGCAAGCAATTAAGAAGG | 7220 |
| hs132674145 | CACACAACAACAGTATGCTATGG | 7221 |
| hs132675374 | CCTATTTTCTGATTATGATGTGG | 7222 |
| hs132675109 | GACTAGCTGTCACATAAGACTGG | 7223 |
| hs132672115 | GGGGCAATAAAAATAATGCTTGG | 7224 |
| hs132672304 | CGCTGGGAAATCTAAAGAAGAGG | 7225 |
| hs132672479 | ACAACTGACAAAATAACTGATGG | 7226 |
| hs132675420 | CTTGATAAGCACATGTACTTGGG | 7227 |
| hs132674093 | ACTCAGTAACACTCTCCTGCAGG | 7228 |
| hs132675284 | TCCTCACTTTGTTATTCACAGGG | 7229 |
| hs132672398 | GCAAATGCACAGAAGCTGGTGGG | 7230 |
| hs132674952 | AGTTAACTGAGAAAGAGTAGAGG | 7231 |
| hs132672872 | TTGACAGTATGGCTTGAGAGAGG | 7232 |
| hs132674857 | GTCCACACGTTTGCACAGATGGG | 7233 |
| hs132673290 | TATCTGTTACCAAAGGGAATGGG | 7234 |
| hs132675405 | CTCCCTTAGAGCTAAAAACAGGG | 7235 |
| hs132675453 | ATTACAACAGAAGTAGTGGCAGG | 7236 |
| hs132673911 | TTCGAAATAGAGAAGAGGGATGG | 7237 |
| hs132674374 | GACTCATCTTAATTTTCACATGG | 7238 |
| hs132674677 | TAAAAATGTCTAAATGCTAGTGG | 7239 |
| hs132674809 | CTGACATTAATAGCTTGGATCGG | 7240 |
| hs132673429 | ATTTTGAAACAAACTTAGCAAGG | 7241 |
| hs132672652 | TTATGGTCAGGACATTCACTTGG | 7242 |
| hs132672324 | TTTCCTAATACAAACCCTGTGGG | 7243 |
| hs132674623 | TGTTGAACCATATGAAGCCCAGG | 7244 |
| hs132672588 | TTCCTGATGACCAGAAACCCAGG | 7245 |
| hs132673445 | GAGAAAGATGGAAGCTAAGGAGG | 7246 |
| hs132674459 | TATTAACTCTTTAGGATACAGGG | 7247 |
| hs132673730 | GAACCAAAACTCAGGCCGTAAGG | 7248 |
| hs132673428 | GAAACAAACTTAGCAAGGAGTGG | 7249 |
| hs132675191 | ATAAAGGGTAAATTCAAGCCAGG | 7250 |
| hs132672447 | GATGGTATAAGGGCAGTCCTGGG | 7251 |
| hs132675029 | AGGCAGCATCAGATTAACCTAGG | 7252 |
| hs132673408 | TTTTAGAAGAGATTACCATCAGG | 7253 |
| hs132674670 | ACAGAGAGTCATTACTAGATGGG | 7254 |
| hs132672169 | GTAAATACTTTTCAATGAGAGGG | 7255 |
| hs132672616 | GGGAAAGCTTTCCTAATCAAGGG | 7256 |
| hs132674062 | CATCTGACTTTGATTCCACATGG | 7257 |
| hs132672914 | TCTCTAATCTGCACTAGAGAAGG | 7258 |
| hs132673813 | TCTATCTATGTGTAGATCTGTGG | 7259 |
| hs132673576 | CAAAAAATAGAAGCCAATGTGGG | 7260 |
| hs132672180 | TCTAAGGTACAACTGTGTACGGG | 7261 |
| hs132673062 | CCAACAGCAACAACAAAAGGGGG | 7262 |
| hs132673029 | GGACAGAAGAGTGTCTTCCTAGG | 7263 |
| hs132674270 | ACTGCATTATCCTTGTAGACAGG | 7264 |
| hs132672960 | TCACATTTTCTCATAGGCCAAGG | 7265 |
| hs132673569 | TTGCCACGTAGGTCCCCAATGGG | 7266 |
| hs132672259 | TTATGTAAGACAGTGACTAAAGG | 7267 |
| hs132674240 | CCCCATTCATATGTCATGAAGGG | 7268 |
| hs132674233 | TACAATCTTTGCCCACTCGTGGG | 7269 |
| hs132672193 | AAGGAGGAAGAGGACGAAAGAGG | 7270 |
| hs132673043 | GAATCTTTAATATAGGTAGTGGG | 7271 |
| hs132673699 | AAGAGATCATACTTTTACTGTGG | 7272 |
| hs132675133 | TAGGATTTATTCCTTGCAGAGGG | 7273 |
| hs132672875 | GGCAGAGAATGCTCAGCAGTGGG | 7274 |
| hs132672044 | TGAAAGCTACTCTGTTAGATGGG | 7275 |
| hs132674111 | ATAAATGACCCCATTAATGCAGG | 7276 |
| hs132673153 | AATTGAATGGAGGTAAAACTAGG | 7277 |
| hs132673299 | ACATTGGCTTTATTTTAGAACGG | 7278 |
| hs132674171 | TTAGCGGTGTTGCTTTTGGTTGG | 7279 |
| hs132673774 | CAGAGTAAGTGAAAACAAGTTGG | 7280 |
| hs132675060 | TGTACAGAAGGATACAAGGCAGG | 7281 |
| hs132675165 | TATTTAGCATTAGAACCTCATGG | 7282 |
| hs132672419 | TGGAAGCTACTCAGTCAGCATGG | 7283 |
| hs132673867 | GAACTTTGAAAGGTTATGGAAGG | 7284 |
| hs132674137 | AGTAATAGTAAATGAGGCTGGGG | 7285 |
| hs132674901 | TAGAGCACGAGCATTTGTGCAGG | 7286 |
| hs132673465 | ATGATTCATTACTATAAGCAGGG | 7287 |
| hs132673412 | TTATCTTCAGGGCAGTGATGCGG | 7288 |
| hs132672541 | ACTCAAGTGCTCTCAGACTGAGG | 7289 |
| hs132674897 | ATGTGGTCAAATCAACCCATTGG | 7290 |
| hs132674591 | ATTCTAATCACCCCATCTGAAGG | 7291 |
| hs132672348 | GTTAAAAAATTTAACATGGGAGG | 7292 |
| hs132672767 | CATTGTGTACCAAGCTCTTGAGG | 7293 |
| hs132672084 | AAGTCCGTTAGCACAAAAGCAGG | 7294 |
| hs132673767 | TTTAACTTATATTTTATACCTGG | 7295 |
| hs132674930 | GAAAAGAGACAGCCAGAAGTGGG | 7296 |
| hs132674453 | TATATTAGTTCACTTACATAGGG | 7297 |
| hs132673214 | ATTTATGGTATCTATGGAAGAGG | 7298 |
| hs132672953 | GGCTGAAGTCATTTAATCCATGG | 7299 |
| hs132675401 | GTCCTTAGTTTGCAGTATAGGGG | 7300 |
| hs132674973 | AGGTTACTCATTTTATTACAGGG | 7301 |
| hs132673495 | GTCTTTGAGTAACATATCCCAGG | 7302 |
| hs132674992 | TCACAGTTGTCATGGATACATGG | 7303 |
| hs132674504 | ACATTAAATGATAGGAACATAGG | 7304 |
| hs132672121 | TTTCATTTACATAAAACATGTGG | 7305 |
| hs132674468 | CCAAGCATAATTACCCGTGATGG | 7306 |
| hs132673786 | AGTTACTGCAACTGAATGACAGG | 7307 |
| hs132673934 | AATGTGGAAGTAACAAAGACAGG | 7308 |
| hs132675464 | TGCAGTATGCTCCATCCATAGGG | 7309 |
| hs132675104 | AGAGAGACAACTGTGCAGACAGG | 7310 |
| hs132672802 | GGCGTTAAAAAAATCCCCATGGG | 7311 |
| hs132675150 | ATAATTATAAGTGATATCACAGG | 7312 |
| hs132672908 | AAGGCAGTCATGGTTCCTCTAGG | 7313 |
| hs132673881 | TATGACCACTGACAGTTAAGGGG | 7314 |
| hs132674735 | ATGGTGGGAACAAACTCCACTGG | 7315 |
| hs132674411 | AGTCAGAGTATCAAAATCACTGG | 7316 |
| hs132673691 | TCTATGGTATCGGGATAAGATGG | 7317 |
| hs132674100 | GAAGTTACTGCAATATTAGGAGG | 7318 |
| hs132673065 | ACAGCAACAACAAAAGGGGGGGG | 7319 |
| hs132674616 | AGTTTTTTAGAATTCTTGCTGGG | 7320 |
| hs132675163 | TGTAATAGACACTTTGTGGATGG | 7321 |
| hs132675231 | TTACACAGGTTAAAATTGAGAGG | 7322 |
| hs132673973 | TACAGTTAATAATTTCCTGAGGG | 7323 |
| hs132674740 | GAAGGTTAGGAATTTTACGTTGG | 7324 |
| hs132673533 | TTAATAATAGTAAAAAAGCCAGG | 7325 |
| hs132672920 | GTGATTATAGAGGTGTAAGCAGG | 7326 |
| hs132673735 | CTTCAGCAATGTGATGAGTAGGG | 7327 |
| hs132674313 | AGACTATGCATGAAGTACTAAGG | 7328 |
| hs132672732 | AGTTGAGTAACTATATATGTAGG | 7329 |
| hs132674096 | ATTTGTTAATAGGTGACCATCGG | 7330 |
| hs132674060 | AGTCAGATGCCATAAATGACTGG | 7331 |
| hs132672309 | TCAGGCCAAGTTTCTGCCAAGGG | 7332 |
| hs132674961 | AGCCACACTAAAGTTATCAAAGG | 7333 |
| hs132673479 | CTACAGGTAATAACATGACTTGG | 7334 |
| hs132674432 | AATATGTCATGAATTAATAACGG | 7335 |
| hs132673119 | ATTACTAGGAGATTCAAAAACGG | 7336 |
| hs132672372 | TAAGTTCCATTTGTATTGGTAGG | 7337 |
| hs132675018 | GGTCCCTTTATACTCCTGTAGGG | 7338 |
| hs132675220 | CTTTGTCATCAAAAAGGCAATGG | 7339 |
| hs132674960 | GCCACACTAAAGTTATCAAAGGG | 7340 |
| hs132674335 | GATTTTGTTTAGAAAGAACATGG | 7341 |
| hs132672275 | TATGAAACACTCATCAGAAACGG | 7342 |
| hs132675450 | TGGGGAGATCCTCTGTTGGATGG | 7343 |
| hs132674038 | AAGAAATCCCTGGATAGGCCAGG | 7344 |
| hs132672341 | ACAAAGTGCTGGAAGTAAAGTGG | 7345 |
| hs132673292 | GTGTGTTATCTGTTACCAAAGGG | 7346 |
| hs132672403 | AAAACTCCTAAAGTCACAGTTGG | 7347 |
| hs132675102 | GTGAAGCAATAAATAGAAGAAGG | 7348 |
| hs132672956 | TGCTTTATTTGAGCTTAGAGAGG | 7349 |
| hs132673584 | GTTCCATTTCCTCCCCACATTGG | 7350 |
| hs132672951 | GATAAACTACAAAGAGTGCCTGG | 7351 |
| hs132674321 | GGAACATGTATTCCCAAGGTTGG | 7352 |
| hs132672278 | TGAACCTCATGGCGGTCTGAAGG | 7353 |
| hs132674688 | GGTAAGTGTGTGTACTATGAGGG | 7354 |
| hs132673064 | AACAGCAACAACAAAAGGGGGGG | 7355 |
| hs132674987 | ACACTTGCAAAAGTATAACTAGG | 7356 |
| hs132674168 | GTAATAGGATTACATTTACCTGG | 7357 |
| hs132672781 | CTAATTTTTTTCAGAATGGGAGG | 7358 |
| hs132673550 | AAGCTCTTGTTACTTTGAGAGGG | 7359 |
| hs132673706 | GCACAATGATTTAATGGCTAGGG | 7360 |
| hs132673679 | ACTATGAGTGGCAGTGCAGAGGG | 7361 |
| hs132674126 | TCATGCTCTAAACACCACTAAGG | 7362 |
| hs132672810 | GTTTGCTTATTCAACACCCATGG | 7363 |
| hs132673229 | CCTCCAAAAGATGAGATTCGAGG | 7364 |
| hs132674071 | CTACTCTCCTCCCTCAAAGCGGG | 7365 |
| hs132673493 | AACATATCCCAGGTTAGGAATGG | 7366 |
| hs132674289 | TTTCATATAGCCATTGAAGAGGG | 7367 |
| hs132673611 | ATAATATCATTATTGTACTCAGG | 7368 |
| hs132672966 | AAAAATACAGGAAGAAGAAGAGG | 7369 |
| hs132672858 | TGATGCCAAGAACACAACTCTGG | 7370 |
| hs132672394 | CAAAAACTATCCCAGCGAAGAGG | 7371 |
| hs132675066 | GCACTGTTAGTGTAGTTGTAAGG | 7372 |
| hs132673416 | TTCAGGGCAGTGATGCGGGGTGG | 7373 |
| hs132675377 | CTCCTATTCTGTAAGTTCAAAGG | 7374 |
| hs132675043 | ACAATGGTATTAAATATTGGTGG | 7375 |
| hs132673081 | GATTTAGTGTGAGGAAAGAAAGG | 7376 |
| hs132674158 | ATGTTTGGATTCATAAGTGTTGG | 7377 |
| hs132672201 | GTTTGCTGCTGGTTGGCTGGGGG | 7378 |
| hs132674876 | TTTAAATATACCAAAATCCACGG | 7379 |
| hs132672272 | TCACTATTTTCATTCTGAGACGG | 7380 |
| hs132674854 | CCATCCTTAGGTTTGAGCAATGG | 7381 |
| hs132673437 | TTTATAGAGCATTTGTATGGGGG | 7382 |
| hs132673137 | TAATGTGGTTGCGTAGGCACAGG | 7383 |
| hs132672252 | CATTTATGATGACTGCACTAAGG | 7384 |
| hs132672683 | CTGAACATAAATCACATGAATGG | 7385 |
| hs132674704 | TGTAAAACAATTTATTCCCAAGG | 7386 |
| hs132672842 | GGCTGTGATATACTTCACATTGG | 7387 |
| hs132672684 | ATCTAGAGAGGAGCAATAGTAGG | 7388 |
| hs132674342 | TGTGAACAATGATTTAAAGTAGG | 7389 |
| hs132674776 | CAGTATTCATGTAGGCTCCCAGG | 7390 |
| hs132673464 | CTGCTTATAGTAATGAATCATGG | 7391 |
| hs132672792 | TGACCAAAATTGGTCACAGATGG | 7392 |
| hs132672894 | TCCTACATCTAGTAAACGTTAGG | 7393 |
| hs132672148 | ATTTCAATAGCTGGAAATGAGGG | 7394 |
| hs132673556 | ACATTCTTCCTCACCTCTATGGG | 7395 |
| hs132672315 | AGCAAGATTTCAAAGATAGCAGG | 7396 |
| hs132674110 | GGTCATTTATATGATATGTCAGG | 7397 |
| hs132673421 | ATACCTACACAACAACTGTAAGG | 7398 |
| hs132672840 | ATTATGTTAACAGCTCCTCTTGG | 7399 |
| hs132674095 | TCACCTATTAACAAATAAGATGG | 7400 |
| hs132673167 | CAGTTTTGATAGAATAAATGAGG | 7401 |
| hs132672826 | GTATATTTATACATTCCAGTTGG | 7402 |
| hs132675004 | TCTGGTCTGAGGAATACTGCTGG | 7403 |
| hs132673795 | ATTTCTTCTACGAAAAGTCCAGG | 7404 |
| hs132672726 | GCCTCTTTATATCGGGGAAGAGG | 7405 |
| hs132674380 | ACTCCTTCTGTGCCCCAATACGG | 7406 |
| hs132674762 | GTGCCCATCTTGTCAATACATGG | 7407 |
| hs132672443 | GGATTTCAAAATATGCCTGATGG | 7408 |
| hs132672449 | AGGACTGCCCTTATACCATCAGG | 7409 |
| hs132674703 | ATACAATTATCAATTACCTTGGG | 7410 |
| hs132673219 | ATATATGATCCTTTTTTCTGAGG | 7411 |
| hs132674745 | GATTACTGGAGTAGAGGCAAGGG | 7412 |
| hs132673505 | AGTTAAGAAGCAGTGGTCTAGGG | 7413 |
| hs132672457 | ACAATTATGTGCCAATTGGAAGG | 7414 |
| hs132673121 | GAGTTGATACCATATAAATTGGG | 7415 |
| hs132673948 | TCAGCAATATGCGGCACACCTGG | 7416 |
| hs132673256 | AGGATTTTGTGTTTAAAAAGGGG | 7417 |
| hs132674101 | ACTGCAATATTAGGAGGCTATGG | 7418 |
| hs132672520 | TGTGTCTTACTCTACATTCAGGG | 7419 |
| hs132672717 | ATTTACACTTGAGTCAACATTGG | 7420 |
| hs132675005 | AGAATGAGTGGGAAGGTCACAGG | 7421 |
| hs132673541 | ATATCTCAAACCATAAATGATGG | 7422 |
| hs132673383 | TAGACATTGTGTTTCTTCCAGGG | 7423 |
| hs132673441 | ACAGAACAAGATCAGAAACTTGG | 7424 |
| hs132674178 | AATGAGCCTCAAAAAATACTAGG | 7425 |
| hs132672464 | GGAAGAAACGAGTGGACCATTGG | 7426 |
| hs132674327 | CCTTCAGTTACACCAACCTTGGG | 7427 |
| hs132673570 | CTTGCCACGTAGGTCCCCAATGG | 7428 |
| hs132672728 | GCCTCTTCCCCGATATAAAGAGG | 7429 |
| hs132674636 | TTCGGGACTTGAATCACAAAAGG | 7430 |
| hs132672599 | GATAAGGAGTCAGGCTCCATAGG | 7431 |
| hs132673435 | TTGTAATGTTACTCATTCATGGG | 7432 |
| hs132673227 | CTCGAATCTCATCTTTTGGAGGG | 7433 |
| hs132672334 | GTTGGCACAACCAAAACCTATGG | 7434 |
| hs132674190 | GAATAATTCATAAATGGAGATGG | 7435 |
| hs132673817 | TGGATAACTGGTGAAAGCCTTGG | 7436 |
| hs132673845 | GAGTTAAACCCTGAATTGTAGGG | 7437 |
| hs132673540 | TTAATAATACATGTAATGCATGG | 7438 |
| hs132673610 | TATCATTATTGTACTCAGGTTGG | 7439 |
| hs132672363 | AAGCATGTTGAAAAGCGTAATGG | 7440 |
| hs132674724 | AATATGTGTGAAGACCAGTTAGG | 7441 |
| hs132673652 | AAACAGAGATTTTTCCCTAACGG | 7442 |
| hs132673142 | TGGATGATGGACTTTACCTAAGG | 7443 |
| hs132675058 | AGAATCTTTGTATCATTGGATGG | 7444 |
| hs132673589 | ATCAGTCTAGTAAATTTGGTAGG | 7445 |
| hs132672051 | TGTCAATTCAAATGGTGCACTGG | 7446 |
| hs132672337 | AGGTTATTGTTTACAACCATAGG | 7447 |
| hs132674384 | TCAAACTACTATTATATCAAGGG | 7448 |
| hs132674872 | GCAGAGTAAGAACTACTGTATGG | 7449 |
| hs132672303 | TGAAGGTTACACCCAGCGACTGG | 7450 |
| hs132672815 | CAGTCAACCTTCTATTTCCACGG | 7451 |
| hs132673245 | AAGAATCATGACTCTTTGAGAGG | 7452 |
| hs132672580 | CTCTCAAATACCTCTCCCTCAGG | 7453 |
| hs132674589 | AAGTTATGCTTCCTTCAGATGGG | 7454 |
| hs132673908 | ACATACAGATGAAGTAAAAGAGG | 7455 |
| hs132673972 | TTAACTGTAAAATAAGATAGAGG | 7456 |
| hs132675409 | AGCTAAAAACAGGGGTAGGAGGG | 7457 |
| hs132674827 | AATCATTTTTAAATAGCCCCAGG | 7458 |
| hs132674525 | TCAAGTAATGGGACTAAGACCGG | 7459 |
| hs132672563 | GTTGCTAATATCTAGTCAAAGGG | 7460 |
| hs132674645 | GCCTGACAAACTGCCCTCAATGG | 7461 |
| hs132675256 | GAATCCGTGTCACCATTCTCAGG | 7462 |
| hs132673559 | AACTGGACTGTTTAATGTGATGG | 7463 |
| hs132673956 | TTATTGCCATAGAGAAATTGAGG | 7464 |
| hs132673978 | CTATTCCACTGCTATGTATGTGG | 7465 |
| hs132672484 | AATGCGTGATGTTCGTCCACTGG | 7466 |
| hs132672261 | TGAGTACTATAAAGTATTTGAGG | 7467 |
| hs132673644 | TGATTGTGAGCCATTTCCATTGG | 7468 |
| hs132674002 | AGTAGGGCAGATATTTGCCCTGG | 7469 |
| hs132673642 | ATTTGTTCATATTAAGACATAGG | 7470 |
| hs132674041 | GTGCTTCTTGAAGAAATCCCTGG | 7471 |
| hs132672504 | TGTGAAGCATTGATGGAGAAAGG | 7472 |
| hs132674475 | GATTTTATGTTAGCCATCACGGG | 7473 |
| hs132672622 | TTGGGGCCAAAACCGTCAATGGG | 7474 |
| hs132674341 | AATTAGTGTTTGAAGATGACAGG | 7475 |
| hs132674689 | GGGTAAGTGTGTGTACTATGAGG | 7476 |
| hs132674226 | GATGCTGTCTTTAGAATTTGGGG | 7477 |
| hs132673553 | TAAGGAAGTGACTTGCTGCCTGG | 7478 |
| hs132675069 | GATATGCAACTTTTACTGACAGG | 7479 |
| hs132673945 | GATTAAGCTAGGAAAGAAAGTGG | 7480 |
| hs132672103 | TTTTCTAGAATTTCAAGATACGG | 7481 |
| hs132672387 | CCATAAAAGCCCTCTTCGCTGGG | 7482 |
| hs132672974 | AAGTGGCTATGGCCAACGTCAGG | 7483 |
| hs132673055 | TCAAGTTTTAATTTTCCCACTGG | 7484 |
| hs132674763 | ACACATACATCCGCATACTAAGG | 7485 |
| hs132675305 | CTTTTAAAATGAGTAGCAGTAGG | 7486 |
| hs132672770 | GGTGATAAACGTTCAGAGGTTGG | 7487 |
| hs132674300 | CTGTGTCACCTCAAATTCTGTGG | 7488 |
| hs132672206 | AGGGAGTGTTTGCTGCTGGTTGG | 7489 |
| hs132672422 | TCTCTCGACATGCCTGTTGTGGG | 7490 |
| hs132672774 | GCACGTGTGCACATGCAAGCTGG | 7491 |
| hs132674257 | ATTTTCCTCTTATTGACTTGAGG | 7492 |
| hs132673278 | GCACTGAACAGGTCATTAGTTGG | 7493 |
| hs132674066 | ACAGTAATGTGCCCGCTTTGAGG | 7494 |
| hs132673502 | GGATCTGTGTGAGATTCTGCTGG | 7495 |
| hs132673554 | GAGAGCTGTGAACAATTGTAAGG | 7496 |
| hs132675298 | TCTTACAGAGAAATCATAACGGG | 7497 |
| hs132672311 | GTTTCTGCCAAGGGACAGGCAGG | 7498 |
| hs132673653 | ATATACATGATTTTCCGTTAGGG | 7499 |
| hs132675081 | TAATAACTAAGGGCTAATAAGGG | 7500 |
| hs132675253 | CAAGAATTAGCTCTGCCTGTTGG | 7501 |
| hs132673578 | TTTGGGTTCTGTATGTACCTAGG | 7502 |
| hs132672293 | CCTTCAACAAAACTAATCTTGGG | 7503 |
| hs132673358 | AAAACTCTGCTTTCCTTCCACGG | 7504 |
| hs132672300 | GTGTAACCTTCAAACACCGCTGG | 7505 |
| hs132673316 | CAAGATGCCTCATAGGTAAGAGG | 7506 |
| hs132673468 | ATATAGTCGAAGACTTTTCAGGG | 7507 |
| hs132672764 | CCCAGAATACCTCAAGAGCTTGG | 7508 |
| hs132672581 | TCAGGTAGAGCTCTACTAGCAGG | 7509 |
| hs132673651 | TATATATGTAGAAATGTACTAGG | 7510 |
| hs132673861 | TTCCTGTTTCTGCTGTTAGAGGG | 7511 |
| hs132674398 | TTTAGTTTGAGCATGTCACTTGG | 7512 |
| hs132674232 | ATACAATCTTTGCCCACTCGTGG | 7513 |
| hs132672469 | ATGCCATCTGGTTTGTCCAATGG | 7514 |
| hs132672501 | TGGAAATTACTTGACATCCATGG | 7515 |
| hs132674203 | TCAGACTGCCTCTAAAATAGAGG | 7516 |
| hs132674378 | TTAGTTTGCTAGGTTTGTAGTGG | 7517 |
| hs132672825 | AGTTGGACCAATTTTTTGAAAGG | 7518 |
| hs132674450 | CTTGTAAACGTAGAAAGAAAAGG | 7519 |
| hs132673604 | TCATTGCATACCATTTAGCTGGG | 7520 |
| hs132674906 | CTTTCCTCAGATTGATCAAGAGG | 7521 |
| hs132675130 | AAAAAGAGAATAAATCTAAGAGG | 7522 |
| hs132672256 | TTAGGTGATCACAGAGTGCCAGG | 7523 |
| hs132672102 | TCTACTATATAAGAAACAATTGG | 7524 |
| hs132673522 | AGGGAAGGTGGTGGTTAAAACGG | 7525 |
| hs132674130 | TATAGATTGGACAATAAGGTTGG | 7526 |
| hs132673411 | TCATTGGCTCATTATCTTCAGGG | 7527 |
| hs132672882 | TAGAAATTGCATATATTCCAGGG | 7528 |
| hs132674943 | TTTTCTGTATAGAATCAGTTGGG | 7529 |
| hs132672709 | GGCTTCCTGACTTTAAGAAAAGG | 7530 |
| hs132674861 | CTAAACCTTACTCAAAATAGTGG | 7531 |
| hs132674986 | GTCATATGACATCGTAAAAGTGG | 7532 |
| hs132673815 | GCTGAAGTAGTGATTGTCCTTGG | 7533 |
| hs132673028 | AAGTAGACTTAGAGAGCCATAGG | 7534 |
| hs132672535 | CCAAATTAGAGAGCATTAGCAGG | 7535 |
| hs132672849 | GATGAAGATTTTAAGTGCCATGG | 7536 |
| hs132673391 | ATAGAAACTATGCTAGGCACAGG | 7537 |
| hs132672783 | AATTTTTTTCAGAATGGGAGGGG | 7538 |
| hs132672989 | ATGAATCAGTGTTTGAAAAGAGG | 7539 |
| hs132675031 | GTTTCTATGTTCATTTTCCTAGG | 7540 |
| hs132673531 | TAGCTATGCCTTCTATATGTAGG | 7541 |
| hs132674373 | ACATCTAAACATTTTTTGGAAGG | 7542 |
| hs132672671 | GCTAATAAAGCCTTCAACTGTGG | 7543 |
| hs132672897 | TTTGGTGTCCTTTATCGTCATGG | 7544 |
| hs132673637 | ATCAATAGTGAGAATTTATGTGG | 7545 |
| hs132672855 | TCTTTAGCATTTTTAAACAATGG | 7546 |
| hs132675361 | GGAAGAGTCTATATATAGAAAGG | 7547 |
| hs132674907 | ATAGCAAAGGTAGTGCTTGAAGG | 7548 |
| hs132674414 | TAGAAGGAAACACCTGAAACCGG | 7549 |
| hs132673944 | ATTAAGCTAGGAAAGAAAGTGGG | 7550 |
| hs132674482 | AGTAGAGCTGACTGAAAGCCTGG | 7551 |
| hs132673037 | AAGAGATAAGACTAAAAGAAAGG | 7552 |
| hs132672572 | TTTTCTCAGTGGCTGGATGAGGG | 7553 |
| hs132675098 | GTTTCCAGCAAGGGTTGCCCAGG | 7554 |
| hs132675181 | CTTTAACAAATCAGCCCCTAGGG | 7555 |
| hs132672674 | CTAAATTTACCTAAATAAAAGGG | 7556 |
| hs132674557 | GCAGCATTATCAATTTATCCAGG | 7557 |
| hs132675079 | ATCCACTTGAAATAAGCAAATGG | 7558 |
| hs132674039 | CAAGAAGCACAGCTACTGTATGG | 7559 |
| hs132674674 | CGCACATTCCCTTTTTCATGAGG | 7560 |
| hs132672048 | TAATATAACTTTCCATTGGAGGG | 7561 |
| hs132675299 | AGAATTGTCTGATTCACAAAAGG | 7562 |
| hs132672344 | CTAAGTTGTAGACCATATCATGG | 7563 |
| hs132675395 | TTAGTTCAGTGAGGTAGAAAGGG | 7564 |
| hs132675210 | CTTCTAACTTTTAGGCCACTGGG | 7565 |
| hs132674447 | AGAAAGAAAAGGTTAGGAAAGGG | 7566 |
| hs132674641 | TGCTGGACTTCTACCATTGAGGG | 7567 |
| hs132672758 | ATAACAAAATTTAATTCTGGTGG | 7568 |
| hs132673376 | AATAAAATAGTATTGAGTGATGG | 7569 |
| hs132674437 | CCAAAGGAGATTCATCTTGTGGG | 7570 |
| hs132674403 | ACATTATTCTTCTCAAGGATGGG | 7571 |
| hs132673804 | CATCATATCAAGTTGCCCATAGG | 7572 |
| hs132672597 | AGATAGTTATACCAAGCCCCTGG | 7573 |
| hs132674055 | TGATTATCTTTAAATGTGACAGG | 7574 |
| hs132674025 | CGAGTGTGCATTTATATATGAGG | 7575 |
| hs132672095 | ACAAAGTTATACAACACATATGG | 7576 |
| hs132674630 | TATCCTCTACGCTTCTTACCTGG | 7577 |
| hs132672529 | CTCTTTTGCAGAATTTTGTAGGG | 7578 |
| hs132675185 | TTATAATTTCTATCTCCCCTAGG | 7579 |
| hs132674207 | TAATGTATTTTTGAAAGCATCGG | 7580 |
| hs132672573 | CTCATCCAGCCACTGAGAAAAGG | 7581 |
| hs132674133 | ATTGATTCTGAAAGATATCAAGG | 7582 |
| hs132674500 | TATTTCTTCTGTTCCAGGATGGG | 7583 |
| hs132675117 | CTGGATCTTATCCTATAAAAGGG | 7584 |
| hs132675468 | TTTAAAATGTGTATGCCCTATGG | 7585 |
| hs132674280 | CCCTTCACTTTCCACATGAAGGG | 7586 |
| hs132674496 | GCCCAGAGCAGAAATTCAAATGG | 7587 |
| hs132674883 | AGGTATTGAAAATTGCATATAGG | 7588 |
| hs132672232 | TTTACAGTTTTACTAAACATTGG | 7589 |
| hs132673303 | ACTGGGATGTGAATGCCAATAGG | 7590 |
| hs132672618 | GAGAAAACACATCCCATTGACGG | 7591 |
| hs132673163 | ATAGAAATGAATCTTTCAAAAGG | 7592 |
| hs132672793 | ATTTTGGTCAATTTTTTCACAGG | 7593 |
| hs132673805 | TCTAGTTTATAAAAGTCATCAGG | 7594 |
| hs132672576 | GGAAGCTATACCAAGAAAATGGG | 7595 |
| hs132674978 | ATTCTGTAGTAGTTACAAGTAGG | 7596 |
| hs132673796 | GCTAAATGTGAATGTCTAGTAGG | 7597 |
| hs132674939 | CCTCAAGAGGCAAGAGTACATGG | 7598 |
| hs132674968 | AAACATTTGGAATCAACTGATGG | 7599 |
| hs132675184 | TATAATTTCTATCTCCCCTAGGG | 7600 |
| hs132675119 | ATTTGCACTCTTCTACCAAAAGG | 7601 |
| hs132674311 | AGATGACTATTCCATGAAGCTGG | 7602 |
| hs132672133 | AATTACTTATTTCTACCTACTGG | 7603 |
| hs132673275 | GTTGGGATTGAGTCAAGAGTTGG | 7604 |
| hs132674882 | ATATGCAATTTTCAATACCTTGG | 7605 |
| hs132673740 | TTTTCCTTTATAACATAATGAGG | 7606 |
| hs132673625 | ACACGTTTGGACATTATTTGAGG | 7607 |
| hs132675158 | CTTGTCACAGAATTTTGCCTTGG | 7608 |
| hs132672808 | AATTTATTATCTTGGTCCATGGG | 7609 |
| hs132674714 | TTGTTGTCTAAGCTGAAGAAAGG | 7610 |
| hs132674293 | ATATTTTTCTGCCTTTGTTGTGG | 7611 |
| hs132674544 | TGCACAAGCATATTTTTGGTTGG | 7612 |
| hs132674892 | TCAGACTAAGAATAAAAAGTAGG | 7613 |
| hs132672913 | AACTGAATTTTTGTACCAGTTGG | 7614 |
| hs132672950 | CTTTGTAGTTTATCAAGAGCAGG | 7615 |
| hs132675249 | CAGGAGTAAAACTTTCCAACAGG | 7616 |
| hs132674455 | GTATCCTAAAGAGTTAATATAGG | 7617 |
| hs132672142 | TTAAAATCATATAATATTGGAGG | 7618 |
| hs132674932 | TGTTGTAGTTGTTAATCAAAGGG | 7619 |
| hs132673535 | ATATTTTGAAATGAGTCTTAGGG | 7620 |
| hs132675416 | CTTCTCCTTTGGATAATGCATGG | 7621 |
| hs132673909 | TAGAGAAGAGGGATGGGCATAGG | 7622 |
| hs132675086 | ACATTTTTATTGGCTGCAAAAGG | 7623 |
| hs132673772 | GAAAATGGTTGTGTATCAAAAGG | 7624 |
| hs132674413 | ATTACTCCTTGAATTGGCTATGG | 7625 |
| hs132672969 | AAGATAAGAATAAATCCAACAGG | 7626 |
| hs132673810 | ACAGATCTACACATAGATAGAGG | 7627 |
| hs132672688 | ATAAATTCTATTTATTGCTAGGG | 7628 |
| hs132672741 | ATAATTAATATAAGATAGACTGG | 7629 |
| hs132675267 | TGACATTTACAAACCCGTTAGGG | 7630 |
| hs132672082 | TTAAGCTAAGATAAATTGTATGG | 7631 |
| hs132673875 | TGACCCATTATTTTATCAAGTGG | 7632 |
| hs132674003 | TTCTCTGTGGCAACAAAGTAGGG | 7633 |
| hs132674521 | TGGAACCCTTGCCCTTTAGCAGG | 7634 |
| hs132675373 | TTTTTTGTGGATATATACATAGG | 7635 |
| hs132674514 | AGGGATGTCTGAAATTCCTTAGG | 7636 |
| hs132672196 | GGGTAGATTGAAACTTTTGTTGG | 7637 |
| hs132674520 | TTAGCAGGCCATTTCTCCTAAGG | 7638 |
| hs132674555 | CGAGCACTGATAAGATTAGCTGG | 7639 |
| hs132674730 | ACTACCTACAGCATTGTGATAGG | 7640 |
| hs132674261 | CTATCTGGTGGTCTTCTCAATGG | 7641 |
| hs132673368 | CTGTGGTTCCCCCAAGATAAGGG | 7642 |
| hs132675240 | ATGTTGGGTTTGATATCAATTGG | 7643 |
| hs132672080 | CATTACCTTGACCTCCTGCCAGG | 7644 |
| hs132674532 | ACGAATTGTTTCTTTCCCTCCGG | 7645 |
| hs132675217 | AGCAATTTCCTCTTCCCTGATGG | 7646 |
| hs132672695 | TCAATGTACAAACTAACTTAGGG | 7647 |
| hs132672816 | GTTGCATCCGTGGAAATAGAAGG | 7648 |
| hs132672445 | AAATATGCCTGATGGTATAAGGG | 7649 |
| hs132675068 | TGACAGGACATAATGAACTTTGG | 7650 |
| hs132674132 | TAGACACTTGAAATATAGATTGG | 7651 |
| hs132673924 | TTACACTGAAAGTTGCTAGAAGG | 7652 |
| hs132674162 | CTTGAATTGAATCAGAGAAATGG | 7653 |
| hs132673287 | CAGCTACCACCCATTCCCTTTGG | 7654 |
| hs132674379 | AGAAATCTACTTAGTTTGCTAGG | 7655 |
| hs132672400 | ATTTGCTCTGAGGCACTCTCAGG | 7656 |
| hs132673333 | TGTCCAGATGAGCTTTAGCTTGG | 7657 |
| hs132673451 | GCAAAGGTAAAAATAATTGTAGG | 7658 |
| hs132674675 | TTTAAAAACCTCATGAAAAAGGG | 7659 |
| hs132672508 | ATCATCATATTTGTGTTACATGG | 7660 |
| hs132674016 | TCAGGTTTACTTGCAAGGAATGG | 7661 |
| hs132674796 | ATTTTTGTGGGTACATACTAGGG | 7662 |
| hs132674653 | ATACCAGAATTAGAGTATATCGG | 7663 |
| hs132673347 | ACCAGAAAGAGTACAAATAAGGG | 7664 |
| hs132673030 | AGAGTGTCTTCCTAGGCAATAGG | 7665 |
| hs132673123 | GCAAAAGCCTATAGACATACAGG | 7666 |
| hs132674361 | TCTAACCTAAATGTATTTGAGGG | 7667 |
| hs132673155 | TCCAATTCTGTTCTGCAGACGGG | 7668 |
| hs132673536 | TTGAAATGAGTCTTAGGGCTAGG | 7669 |
| hs132672742 | TTAATATAAGATAGACTGGTTGG | 7670 |
| hs132673848 | TTAACAAGTTATATGATTCAGGG | 7671 |
| hs132674258 | AATTACCTCAAGTCAATAAGAGG | 7672 |
| hs132672433 | TATGTTAGCGAGGAAGATAAGGG | 7673 |
| hs132675293 | TCTCTGAGTTTCAAACAGATTGG | 7674 |
| hs132674742 | TCATATATAACTCAATATACCGG | 7675 |
| hs132675443 | TTGCCATGCCAATTTTGAAATGG | 7676 |
| hs132673011 | GCTCTATATGACCATGGTCCAGG | 7677 |
| hs132674458 | GTTAATATAGGATGTAATATAGG | 7678 |
| hs132673230 | GTCTGTACCTACCCAGATATAGG | 7679 |
| hs132672701 | GATTAGTAAGAACCTTTCTCAGG | 7680 |
| hs132672071 | GTAGCAAATGAATCTTTTGAAGG | 7681 |
| hs132673608 | TGGCTGTTAAAAAGTCATAAAGG | 7682 |
| hs132674405 | GTATTTTTATCTTTTTGACTTGG | 7683 |
| hs132672258 | GAGTTTCTTAACAAATACTTAGG | 7684 |
| hs132672517 | AATGAACCTTTATTCCCAAAAGG | 7685 |
| hs132674517 | AGGAGAAATGGCCTGCTAAAGGG | 7686 |
| hs132674215 | GAGATTTACAGACACATAGTAGG | 7687 |
| hs132674206 | AGAAAATTTTGTAATGAGGTGGG | 7688 |
| hs132673630 | AGCAAATCTTGGCTTTAGCCAGG | 7689 |
| hs132673127 | CTAGAGCTCAAGTGAAATATGGG | 7690 |
| hs132672868 | GTAAAGACTCTAATATATAAGGG | 7691 |
| hs132672416 | CACTAACTTGACATAACAAATGG | 7692 |
| hs132673723 | CCCTTCAAAGCCTTTCCTTACGG | 7693 |
| hs132674914 | TAAAAAATATGGAATATTAAGGG | 7694 |
| hs132674021 | CCTTTTGATCTAGCTATCCTGGG | 7695 |
| hs132674859 | ACTTTTGCTTATGTTAGCTCAGG | 7696 |
| hs132674426 | TTACCATTTCAAATTATGAATGG | 7697 |
| hs132673646 | GCGTCTGTTTTTTCATCCAATGG | 7698 |
| hs132675413 | GTGTATAGAAGCAATAAAAAGGG | 7699 |
| hs132673880 | TTAACTGTCAGTGGTCATAAAGG | 7700 |
| hs132675447 | ATAACTTTGACTCTTATCTCTGG | 7701 |
| hs132673332 | GTCCAGATGAGCTTTAGCTTGGG | 7702 |
| hs132673042 | GGAATCTTTAATATAGGTAGTGG | 7703 |
| hs132673745 | GCTCAACTTTTTTTTTGTATGGG | 7704 |
| hs132674953 | GTTAACTGAGAAAGAGTAGAGGG | 7705 |
| hs132672968 | CTTCAGTGAGAACTTCCTGTTGG | 7706 |
| hs132672672 | CATGTCTCTAGAGATAGAATAGG | 7707 |
| hs132674810 | GTGCAGACATGGTTGATTCATGG | 7708 |
| hs132675341 | CAATTCTTGCCATTGTGTTAGGG | 7709 |
| hs132672092 | AAATGAATAAAACAATAAAACGG | 7710 |
| hs132673993 | GGAGACATAAGTATGTGAAATGG | 7711 |
| hs132672546 | TGCTAAGCGTCTGCATACCTGGG | 7712 |
| hs132675386 | AGAGCATACACCCCAATAATGGG | 7713 |
| hs132674452 | ATAGAGGTAGACGTTTTAAAGGG | 7714 |
| hs132672604 | CTGATCTTGGATTGACCAGATGG | 7715 |
| hs132674153 | AACCTCAACTTAAACCCAAATGG | 7716 |
| hs132673508 | TTTGCGCAACAATTTTCAAATGG | 7717 |
| hs132673532 | ATTCAAAGCCTACATATAGAAGG | 7718 |
| hs132672110 | TGTATAACACAGCAGTGAATAGG | 7719 |
| hs132672047 | TATTAACATGTCAATTCAAATGG | 7720 |
| hs132672302 | ACACCCAGCGACTGGCTAATCGG | 7721 |
| hs132674263 | AAGCTGATAGTTCCTAACTATGG | 7722 |
| hs132674731 | GTGATAGGCCAGCAGTACTATGG | 7723 |
| hs132675308 | GCCTGAGGTTTAGTTTTAAGTGG | 7724 |
| hs132672162 | AGTGAAAACTAAGATGAAACTGG | 7725 |
| hs132673061 | ACCAACAGCAACAACAAAAGGGG | 7726 |
| hs132673882 | TTATGACCACTGACAGTTAAGGG | 7727 |
| hs132674727 | AGGAAGTCACCACCAATAACAGG | 7728 |
| hs132674419 | AGTTCTATCTTCTTCTGTACCGG | 7729 |
| hs132675113 | CTAGAAGTCTAAACAAATGCTGG | 7730 |
| hs132673906 | TTACATGTCTGTTTTGTTTGTGG | 7731 |
| hs132672738 | ATAAGTTGAGATATACTTTGAGG | 7732 |
| hs132673169 | AGGCAGAAGACAGCTTTTAAGGG | 7733 |
| hs132673562 | AACAGAACCTTTTCTCCCATTGG | 7734 |
| hs132672753 | GTTTAAACTTTGCAATACTAAGG | 7735 |
| hs132674963 | CATTAAATAATTAAAGTAGAAGG | 7736 |
| hs132674603 | TTAAGGAAAGAGCTATCTTAAGG | 7737 |
| hs132672740 | TTTCAATTCATCAGATTATGTGG | 7738 |
| hs132673009 | TTATTACATAGTCAGTACTATGG | 7739 |
| hs132674388 | GAAAGATGCATAACAACAATTGG | 7740 |
| hs132673992 | CACTACCTTCTATTAAAAAGAGG | 7741 |
| hs132672992 | TTAAAGATAGATTGGGGGGGTGG | 7742 |
| hs132673558 | TCACCTCTATGGGTACTAACTGG | 7743 |
| hs132673761 | ACAGGAATATTTGCTCTTTGAGG | 7744 |
| hs132674510 | TGTGCGAGTGTATCTTTCTAGGG | 7745 |
| hs132672217 | AATCTAAGAACATTTCAGATTGG | 7746 |
| hs132674825 | GAACTCATCTGTGTGTTTAGAGG | 7747 |
| hs132675047 | CCGTTGTCCTAGCAGCTATATGG | 7748 |
| hs132674367 | ATATTGCATGCGCTAATCATAGG | 7749 |
| hs132674599 | TTACATGTCTAAATACCAATTGG | 7750 |
| hs132673161 | GATATGGATATACTTATAGATGG | 7751 |
| hs132675264 | GATTAAAACCAAACCCTAACGGG | 7752 |
| hs132674541 | ACATCAGTGGTTTAGTTTTGAGG | 7753 |
| hs132673482 | TGGTCCTGTTCTCTGGGTAATGG | 7754 |
| hs132672537 | ACTTTGTCATCATCACTCATAGG | 7755 |
| hs132672623 | CTTGGGGCCAAAACCGTCAATGG | 7756 |
| hs132674691 | AAGCAATACACACTACATATCGG | 7757 |
| hs132673331 | GGACAATCACAAGGGTTTAGAGG | 7758 |
| hs132672470 | CATCAGTGTTGTATGCCATCTGG | 7759 |
| hs132672404 | TGCCGTGTGCCCTAATCAACAGG | 7760 |
| hs132674989 | ACTATCATGAACCAGCCTTCAGG | 7761 |
| hs132672658 | GTCATTCTGCAGTCCATCATAGG | 7762 |
| hs132674667 | GCAGTAAAATCAATAATAAAGGG | 7763 |
| hs132675428 | GATTTCATCAATTCCAAAACAGG | 7764 |
| hs132674412 | CCAATTCAAGGAGTAATAGAAGG | 7765 |
| hs132672188 | TAGCACATAACTTTGTATATAGG | 7766 |
| hs132675335 | GCATGAATCACGAATTTTGCTGG | 7767 |
| hs132675017 | TTTCCCTACAGGAGTATAAAGGG | 7768 |
| hs132674916 | GTATTTCACATGCAGTTTGTTGG | 7769 |
| hs132672458 | AATTACAATTATGTGCCAATTGG | 7770 |
| hs132672314 | TTCCATTCCTGCCTGTCCCTTGG | 7771 |
| hs132673226 | CCTCGAATCTCATCTTTTGGAGG | 7772 |
| hs132672335 | TTTTGGTTGTGCCAACATATAGG | 7773 |
| hs132672477 | CATACGCAACATCAGAATAAGGG | 7774 |
| hs132672763 | ATAACTGCACACCAAGCATTTGG | 7775 |
| hs132673663 | TGATTTACTTCTAAAATAAGTGG | 7776 |
| hs132673748 | AGGAAAAAAAACACAAAAAACGG | 7777 |
| hs132675257 | CACGGATTCTATTTTCTGCTTGG | 7778 |
| hs132672255 | GATCACAGAGTGCCAGGAATTGG | 7779 |
| hs132675262 | TTATTTTGACTTCCTGAGAATGG | 7780 |
| hs132673843 | AAGAAATTCCCTACAATTCAGGG | 7781 |
| hs132674354 | ATTCCTCTAGTATTGCTATTCGG | 7782 |
| hs132672663 | TTTTGTGTTGGTAAATTTGTCGG | 7783 |
| hs132674503 | GGAAAAACACATTAAATGATAGG | 7784 |
| hs132673040 | TAGTTACTAATATTTTTCATAGG | 7785 |
| hs132673962 | ATGAATTTCATACTGACTACTGG | 7786 |
| hs132673897 | CCAGAACAATGAGACCAAATAGG | 7787 |
| hs132672455 | GGCACATAATTGTAATTCATAGG | 7788 |
| hs132674856 | GGTGTCCCCCCACCATCCTTAGG | 7789 |
| hs132674425 | TGGCCATTCATAATTTGAAATGG | 7790 |
| hs132675161 | AATATATTAAAAACATCTATTGG | 7791 |
| hs132675277 | TTTCATATCCTAAATGGAAATGG | 7792 |
| hs132673563 | ACAGAACCTTTTCTCCCATTGGG | 7793 |
| hs132672528 | TCTGCAAAAGAGATTCAGTTTGG | 7794 |
| hs132672954 | AATGACTTCAGCCTGCTTTGTGG | 7795 |
| hs132675368 | TGAAGTTTGAGACAGTAAAATGG | 7796 |
| hs132673573 | GTATGTACCTAGGACCTAATGGG | 7797 |
| hs132672598 | TCATAGCTCCAGTCCCCATATGG | 7798 |
| hs132672984 | TTAATGTAGCACTTCAGCTTTGG | 7799 |
| hs132673614 | AGAGAGCAGGGGAAGAAAACAGG | 7800 |
| hs132674936 | CAGTGAGGTGAATTTATTAAGGG | 7801 |
| hs132675314 | GGAAGTCATTGAAACCTTGTAGG | 7802 |
| hs132673873 | CATCCACTTGATAAAATAATGGG | 7803 |
| hs132674720 | GCTTGTTAATGTTAATTCCTTGG | 7804 |
| hs132674286 | ATTTGCTTCCCCCTCTTCAATGG | 7805 |
| hs132674838 | CGTTTCTATAGCTCTCAAAAAGG | 7806 |
| hs132672544 | GCTATGCTTCCAAAGTTCTAAGG | 7807 |
| hs132674679 | TTACTATTCAAGATATTCTTGGG | 7808 |
| hs132672785 | TAGAAGACAATGCATTTTAACGG | 7809 |
| hs132673483 | GTAATGGAGTAAAATGTTACTGG | 7810 |
| hs132672790 | TTTTTTCACAGGCATTTAATGGG | 7811 |
| hs132673187 | TGGAAAGGTGTATACTACTATGG | 7812 |
| hs132675137 | TGTCATTTAAATCTTATAAGAGG | 7813 |
| hs132672961 | TAACTATCACATTTTCTCATAGG | 7814 |
| hs132674956 | CAGTTAACTCTAAAATTAGATGG | 7815 |
| hs132675259 | TCTCAGGAAGTCAAAATAAAGGG | 7816 |
| hs132672687 | GATAAATTCTATTTATTGCTAGG | 7817 |
| hs132674642 | CAGCAGTGCTCATTTCTATAGGG | 7818 |
| hs132674440 | ATATTAGTAGTTGGGCCAATAGG | 7819 |
| hs132673538 | GCATTACATGTATTATTAAAGGG | 7820 |
| hs132673440 | AGTTTTATAGAGCATTTGTATGG | 7821 |
| hs132672454 | TTTCCTGATTTCCTTCCAATTGG | 7822 |
| hs132673645 | GTTTTTTCATCCAATGGAAATGG | 7823 |
| hs132673041 | GAGTTTGGAATCTTTAATATAGG | 7824 |
| hs132673574 | TGTATGTACCTAGGACCTAATGG | 7825 |
| hs132674018 | CATATATTGATGTTGCATATAGG | 7826 |
| hs132674180 | CAAAAAAGTAGCCATTTAAAGGG | 7827 |
| hs132674353 | TTAAATTCTACATTCTCTGCTGG | 7828 |
| hs132674166 | CGCATTATAGGCATAGTAATAGG | 7829 |
| hs132674408 | AGTGCTCTATATAAATATATTGG | 7830 |
| hs132673990 | TTTATTATCTAATTGATCCTTGG | 7831 |
| hs132675404 | TCTCCCTTAGAGCTAAAAACAGG | 7832 |
| hs132672313 | CCTGTCCCTTGGCAGAAACTTGG | 7833 |
| hs132672694 | TTCAATGTACAAACTAACTTAGG | 7834 |
| hs132674552 | GGCCTCACGCCCTATAAAACTGG | 7835 |
| hs132675300 | TGTTTATGCTCATAGATAATAGG | 7836 |
| hs132673125 | ACAGCTTCCTGTATGTCTATAGG | 7837 |
| hs132675138 | ACTATTTTACAACAATATTTGGG | 7838 |
| hs132673309 | CTTGTTCTCATGGAATCCTTAGG | 7839 |
| hs132672461 | ATAAAACGTGATTAATTGCTTGG | 7840 |
| hs132675014 | CTAGAGGCAGGCAAAATAACTGG | 7841 |
| hs132672675 | GTAAATTTAGTACACAATTAGGG | 7842 |
| hs132674332 | ACATGGTGGGAAGCAATAAAAGG | 7843 |
| hs132675448 | TTTCTGCTTCTTTAGTTGATAGG | 7844 |
| hs132672982 | GTGCCTCAAGACTAAATATTGGG | 7845 |
| hs132672468 | GGTCCACTCGTTTCTTCCTTAGG | 7846 |
| hs132674338 | TGTTCTTTCTAAACAAAATCCGG | 7847 |
| hs132673395 | ATAGTTTCTATATATTTATTAGG | 7848 |
| hs132673654 | AATATACATGATTTTCCGTTAGG | 7849 |
| hs132673600 | ATTCCTGCCAAATTATTTCATGG | 7850 |
| hs132672368 | TAGAGCATAACAGGGAAAAAAGG | 7851 |
| hs132673474 | ATTTGCAGATTTGGTGAAAATGG | 7852 |
| hs132673492 | TTACTCAAAGACGTTCTATCTGG | 7853 |
| hs132674865 | AAGGAACTATAGAAAAAGTTAGG | 7854 |
| hs132675219 | ATATTACTTTGTCATCAAAAAGG | 7855 |
| hs132674871 | ATGTCCAACTAATAAAATTAGGG | 7856 |
| hs132675456 | TCTGTTGTAATTTTTCACTCTGG | 7857 |
| hs132674050 | AGACTCAGTCCCCAGAAAAATGG | 7858 |
| hs132673378 | TATTTAGTTGTATAAGTAATGGG | 7859 |
| hs132672655 | ATACTTTGTATATTCATTGTAGG | 7860 |
| hs132673977 | GTATAATATAAACACAAAATAGG | 7861 |
| hs132672854 | TTACTGATGTAATTTATAACAGG | 7862 |
| hs132675023 | CTAAAGTTATGTCAAATAACTGG | 7863 |
| hs132672880 | GAATATATGCAATTTCTAATAGG | 7864 |
| hs132673247 | GCAACAGCGCTGACATTTCTAGG | 7865 |
| hs132674873 | GCTTCCCTAATTTTATTAGTTGG | 7866 |
| hs132673602 | ATTCTGTCTCCCCAGCTAAATGG | 7867 |
| hs132673686 | CTCACTCTCCCAAGTCAATATGG | 7868 |
| hs132672707 | TTACTTTTGCTTTTACTGATAGG | 7869 |
| hs132674715 | GTAAGATCAAGGAAAATATTAGG | 7870 |
| hs132674593 | CGCAGTTTTCCAAAAGAAATCGG | 7871 |
| hs132672828 | CTAAACGAGGTGAATAAAATAGG | 7872 |
| hs132672666 | AGAATATTACAATAATATTAAGG | 7873 |
| hs132674755 | GTATGTCTGGGGTAGAAATTTGG | 7874 |
| hs132675474 | GACTACCACTGCTTTTAGTATGG | 7875 |
| hs132672489 | TATCTTTGTAATTTGAAAATGGG | 7876 |
| hs132675075 | CTGATATTAATGCCATAAATAGG | 7877 |
| hs132674661 | TATTTCATCATTCCACTGATAGG | 7878 |
| hs132673619 | TTAGAATTTTCCTAAGGAAATGG | 7879 |
| hs132672659 | TAGGTTTTATTACTGTTTAATGG | 7880 |
| hs132674220 | GTCAAAGTCAATTTACATAATGG | 7881 |
| hs132673060 | CACCAACAGCAACAACAAAAGGG | 7882 |
| hs132672731 | ACTAGAGAAGGTAGGCAAATAGG | 7883 |
| hs132674308 | TGAAATATAAACCAGCTTCATGG | 7884 |
| hs132672570 | TCTTTCCTTTTCTCAGTGGCTGG | 7885 |
| hs132674524 | TACCCCTTCTTTCAAGTAATGGG | 7886 |
| hs132672821 | TCAAATATAATACATTTAAATGG | 7887 |
| hs132675016 | TTTTCCCTACAGGAGTATAAAGG | 7888 |
| hs132674660 | AATTTAGTCAAATTTATTACAGG | 7889 |
| hs132675222 | GCACTTACATGAATGAAAAATGG | 7890 |
| hs132675155 | GATGGTAAATGAGAATAAAATGG | 7891 |
| hs132675225 | AGGTGTTCCTTCTCTATATACGG | 7892 |
| hs132673953 | GCCTTACCTCAATTTCTCTATGG | 7893 |
| hs132672690 | CTATATTTGTATTATTTTAGAGG | 7894 |
| hs132672648 | ACAAATATCTTCTTATTATGAGG | 7895 |
| hs132673397 | GTCCTCATAAACACACAAAATGG | 7896 |
| hs132673994 | TGTCTCCTCTTTTTAATAGAAGG | 7897 |
| hs132672360 | TGTTTCTCCTGGATAAATATAGG | 7898 |
| hs132674249 | AGGAATGTCAGTAAATTTAATGG | 7899 |
| hs132675049 | GCAGCTATATGGAGCACATTTGG | 7900 |
| hs132674643 | CCAGCAGTGCTCATTTCTATAGG | 7901 |
| hs132675218 | TCATCTGTATCATACCTATTTGG | 7902 |
| hs132673365 | TCTCAGTAGAACATTAAAAATGG | 7903 |
| hs132673749 | GAACATGACTAAAATCTTAAAGG | 7904 |
| hs132673958 | TTTAGCTTAGTTCTTCTGTTTGG | 7905 |
| hs132673957 | AACAGAAGAACTAAGCTAAATGG | 7906 |
| hs132673080 | ACTTTGTGTTCAAGGTAAAATGG | 7907 |
| hs132673890 | GGAGCAAAACGACCACAAATAGG | 7908 |
| hs132672985 | AAGCTGAAGTGCTACATTAATGG | 7909 |
| hs132673629 | AGATTTGCTGAAGGCTTTTAGGG | 7910 |
| hs132675376 | CCACATCATAATCAGAAAATAGG | 7911 |
| hs132673606 | TTTCTAGATAACTATTAAAATGG | 7912 |
| hs132673872 | CCATCCACTTGATAAAATAATGG | 7913 |
| hs132674201 | AATAGTCTGACACTCTAAATTGG | 7914 |
| hs132675460 | TCATTCATATACTCTATAAAAGG | 7915 |
| hs132673108 | CCTTTTGGTCAGGTGCAATTAGG | 7916 |
| hs132673976 | AATAAATCTGCATTGAAAAATGG | 7917 |
| hs132673307 | TCTGATGTATTTTATCCTATTGG | 7918 |
| hs132675466 | ATAGGGCATACACATTTTAAAGG | 7919 |
| hs132673244 | CACATCGCTTTATTGTAAAATGG | 7920 |
| hs132672052 | AATTAAACAAATACACAAAATGG | 7921 |
| hs132672356 | TGAGAAGCATTGTTACTAAATGG | 7922 |
| hs132674362 | TAGCGCCCTCAAATACATTTAGG | 7923 |
| hs132673171 | TTAAGGGATTAAGGAGAAAATGG | 7924 |
| hs132673800 | TTACACTCTCTGAATGCTTTTGG | 7925 |
| hs132672494 | TGGCTTCCACCATTGTAATTAGG | 7926 |
| hs132672338 | CATTGATGTGATATTCTAAAAGG | 7927 |
| hs132673819 | CCAGTTATCCAGAAGATTAAAGG | 7928 |
| hs132674543 | GCATGAAAGCTGATGTTTTATGG | 7929 |
| hs132674097 | ATGCCATCTTATTTGTTAATAGG | 7930 |
| hs132675458 | ATAGAGTATATGAATGAAATTGG | 7931 |
| hs132672577 | TGGAAGCTATACCAAGAAAATGG | 7932 |
| hs132674113 | CTTGACATCTTTGTATTAATAGG | 7933 |
| hs132672713 | TTATTGCTCTTTAAAATATATGG | 7934 |
| hs132672438 | TCATGTGACATAAATTTAATTGG | 7935 |
| hs132675118 | TGTGAGATATGCCCTTTTATAGG | 7936 |
| hs132674167 | TGCGGAGTAGTTTTGTTTAATGG | 7937 |
| hs132674547 | ATAAAATGAATGAAGCTAAATGG | 7938 |
| hs132675279 | GTAGAAAGCCATTTCCATTTAGG | 7939 |
| hs132674912 | GCAAAGATATTATCATTTAATGG | 7940 |
| hs132674977 | TTTTCTTTGCATTAACTAAAAGG | 7941 |
| hs132672823 | AGGAAATCCTTTCAAAAAATTGG | 7942 |
| hs132673598 | TGACAAACCATGAAATAATTTGG | 7943 |
| hs132672134 | TTATATTCAAAGTATTTTAATGG | 7944 |
| hs132672138 | TTAAAATGTGTTCCTCTAATTGG | 7945 |
| hs132672490 | GTATCTTTGTAATTTGAAAATGG | 7946 |
| hs132675085 | CCAATGAAAGACATTTTTATTGG | 7947 |
| hs132671958 | AAAACCATAAGTAACCCGAAAGG | 7948 |
| hs132671949 | ATCACGGTCAGTCTAGCACAGGG | 7949 |
| hs132671973 | GAGCATGCTATTTAGCCATGAGG | 7950 |
| hs132671959 | GAAAGGACTACTTTCCAACATGG | 7951 |
| hs132671995 | GTTTGTGCCTGAGAAAGCATAGG | 7952 |
| hs132671948 | ATCTGCAGAGAAGGGTTTGGGGG | 7953 |
| hs132671985 | AATTCATCAGGTCCATACCCTGG | 7954 |
| hs132671944 | TGACCGTGATCTGCAGAGAAGGG | 7955 |
| hs132671968 | GAAGGCACTTAATATCATGTTGG | 7956 |
| hs132671977 | ACTCCAACATTTATATGGGATGG | 7957 |
| hs132672008 | TTTCATTGTGTGTTACACAATGG | 7958 |
| hs132671989 | GAAATTTTTAGTCCTTTCCAGGG | 7959 |
| hs132671950 | GATCACGGTCAGTCTAGCACAGG | 7960 |
| hs132671979 | TGGGATGGTACTCTTCAATCCGG | 7961 |
| hs132671980 | GTACCATCCCATATAAATGTTGG | 7962 |
| hs132671955 | GGGGGAGTGGATAGAGAGGAGGG | 7963 |
| hs132671999 | TTCTTTCTCTCAACAGTGGGTGG | 7964 |
| hs132671993 | TGAATGTGTGGAGAGCTCTTAGG | 7965 |
| hs132672002 | GTGGGGTTCTTCCATGACATTGG | 7966 |
| hs132672004 | ATAATTGTATAGAATTTAGTGGG | 7967 |
| hs132672011 | ATTCATATGTACCATATCATAGG | 7968 |
| hs132671982 | TTATGGATGCCTGTTTTTGCCGG | 7969 |
| hs132671946 | TGATCTGCAGAGAAGGGTTTGGG | 7970 |
| hs132671966 | ATATAAATGATATTCGAAATTGG | 7971 |
| hs132672010 | TGTTCTATATTCCTATGATATGG | 7972 |
| hs132670257 | CAGACACTGATATCACACTGAGG | 7973 |
| hs132671162 | TCTCACAAGTAAGCTCACTGGGG | 7974 |
| hs132670891 | CAAAACCTAAGCAAACCCTGGGG | 7975 |
| hs132671289 | TAATTGGAGTTATTCCACAGGGG | 7976 |
| hs132670076 | GAAGCCAAGTAATAGAGACGGGG | 7977 |
| hs132670047 | GCATCAGTAAGAAAACAAGGAGG | 7978 |
| hs132670717 | ACATATGAGTGTATACACTGAGG | 7979 |
| hs132670065 | GTGTGTAAGAGCAAGCAAGGAGG | 7980 |
| hs132670299 | GTACTGTGCTGTTAGGCACGGGG | 7981 |
| hs132670673 | TGGGCACTATAAATATGACAAGG | 7982 |
| hs132671813 | TATAAGAGGAGAGAGCCATGTGG | 7983 |
| hs132670286 | GTGGCACTAACAAAAACACAAGG | 7984 |
| hs132670256 | TCAGCAACGTAATGAAGACGAGG | 7985 |
| hs132671620 | AAGAAATATTTACAACAACGTGG | 7986 |
| hs132670703 | GCATAAGATGGAAATCCTAGGGG | 7987 |
| hs132670134 | ATGTAGCACATACACACCAGGGG | 7988 |
| hs132670885 | ATGTGTACTTCTAAACAGTGAGG | 7989 |
| hs132671421 | GAGACAGTGAACCAAGCATGGGG | 7990 |
| hs132671501 | TGAGAAATAAGATTAGCCCGTGG | 7991 |
| hs132671040 | AATTTGGAGCCTGATATGAGTGG | 7992 |
| hs132671843 | GAGCGATGCCTTAATGAAGGTGG | 7993 |
| hs132670086 | ATACACTCAAGTGACAGGAGAGG | 7994 |
| hs132671001 | CACATGTTACTGCTCCAATGTGG | 7995 |
| hs132670117 | ACGGGGCCCCCTAACAAACAGGG | 7996 |
| hs132670111 | CATAGGCATACTATTTACGGAGG | 7997 |
| hs132671519 | GTAATGATGCCAATGATGAGAGG | 7998 |
| hs132671541 | ATACATGTGTTAAATCCATGTGG | 7999 |
| hs132671899 | ACATTGCCGAGAATATGACCTGG | 8000 |
| hs132671280 | AATATTGCTAGGTATGCTAGGGG | 8001 |
| hs132670768 | GATTATGGGAAACTGGAAGGAGG | 8002 |
| hs132671810 | ATAGGGGACAGTCACCCACATGG | 8003 |
| hs132671595 | GGTGTTTAAGCAGGTCAGGGCGG | 8004 |
| hs132670784 | GTGCTGCAAATGAATTGAGGAGG | 8005 |
| hs132671078 | AAGTGAATATATGCTATGAAGGG | 8006 |
| hs132670663 | AATTGATGAGATATATACTGAGG | 8007 |
| hs132670833 | GGTTGAAGGACACATTGTGGAGG | 8008 |
| hs132671580 | AGGTGAGCTAAGCATTACACAGG | 8009 |
| hs132670181 | GACTTAAGAAGGTAATCTTGGGG | 8010 |
| hs132671317 | GTGAGTAAAATTGATTGACGTGG | 8011 |
| hs132670023 | CCACTGGCATTATCAAACACAGG | 8012 |
| hs132670929 | ATACATCAGGTTGACCTGGGAGG | 8013 |
| hs132671611 | GATACCAGAGATAGGTCCAGAGG | 8014 |
| hs132670842 | GTAGGGCATATGGTTAGGGGAGG | 8015 |
| hs132671628 | TATCACATAGAGTGTTAGAGGGG | 8016 |
| hs132671357 | ACTCCCGTCTCAAATATAAGGGG | 8017 |
| hs132670211 | GATGATAAAAACATATTTTGGGG | 8018 |
| hs132671854 | AATAAAGTGATAATGAGAGGGGG | 8019 |
| hs132670669 | AACAGAAGTAGGGAAAGAGGGGG | 8020 |
| hs132671313 | ATACTATTTTGTTTACTGGGGGG | 8021 |
| hs132670672 | TCTTAGAGTGTATTGGACGTGGG | 8022 |
| hs132670337 | TTACAAACACCCTAAAAGGGGGG | 8023 |
| hs132670024 | CCTGTGTTTGATAATGCCAGTGG | 8024 |
| hs132671832 | GCACAAATCACAAGAGATGGGGG | 8025 |
| hs132670136 | AATGTAGCACATACACACCAGGG | 8026 |
| hs132671255 | TGACTGTGAGAGAATGAGGGAGG | 8027 |
| hs132670449 | AGGGAGAGAAATCCCTATGGGGG | 8028 |
| hs132671610 | TAGGTCCAGAGGTATTGCTGTGG | 8029 |
| hs132671636 | ACATGAATAGAATAATTCAGAGG | 8030 |
| hs132670977 | ACTTATGCATGGGATTGGGGAGG | 8031 |
| hs132671759 | GCATGAGGGAAGACAGCAGGAGG | 8032 |
| hs132670115 | AAATATTGCAAGCAAGCACGGGG | 8033 |
| hs132671794 | AAGACACAGAATAGTCAGAGAGG | 8034 |
| hs132670869 | ATAGTGGGAAGCTTGATTGGTGG | 8035 |
| hs132670689 | TGTGTGACACGATAAATTGGAGG | 8036 |
| hs132671459 | AATAAGTCATTATTACTCAGTGG | 8037 |
| hs132670278 | GTATCATACGTACACATATGGGG | 8038 |
| hs132671898 | TCTATATGAGGAAGACTCAGTGG | 8039 |
| hs132671746 | ATATATAGCAGTTACTACAGTGG | 8040 |
| hs132671923 | AAACAAACCAGCTCTTCACGAGG | 8041 |
| hs132671092 | CTATGTACTTTGCTTCAGGGAGG | 8042 |
| hs132671037 | GTTATAAGCCACAGGCAGAGAGG | 8043 |
| hs132670418 | GCATTCGGGAAACTTTAAGTCGG | 8044 |
| hs132671546 | GCTGCCAGAATTCTATAGCAGGG | 8045 |
| hs132671080 | GCAATGTTGGATATTCAAAGAGG | 8046 |
| hs132671838 | ATTTGGTAATATTTACACAAAGG | 8047 |
| hs132671853 | CAATAAAGTGATAATGAGAGGGG | 8048 |
| hs132670862 | TCTAGTGCATAAAGAACCTGAGG | 8049 |
| hs132670336 | CTTACAAACACCCTAAAAGGGGG | 8050 |
| hs132670857 | GCTATAATTTATGGTCCCAGAGG | 8051 |
| hs132671328 | CTTACTCTACTCAGTGCCTGAGG | 8052 |
| hs132670175 | TATCAAAGTCAGCATTAAGGGGG | 8053 |
| hs132671822 | AGAGCAGGTACAGCCTGTAGGGG | 8054 |
| hs132670613 | CAATATTTTTGACAGTACAGAGG | 8055 |
| hs132671688 | AGAAAGTAATTGGCAAACAGAGG | 8056 |
| hs132670145 | TTAAGTCCTTCGAGATGACAAGG | 8057 |
| hs132671627 | AACACTCTATGTGATAGTGGAGG | 8058 |
| hs132670126 | AGAACAACAGAAGCTGTTTGGGG | 8059 |
| hs132671398 | GTAACTCTTCTATTACGATGAGG | 8060 |
| hs132670901 | ATATATACTCAGCTACAAGTGGG | 8061 |
| hs132670167 | ATTGCCTTACTGTTAGACAAGGG | 8062 |
| hs132671306 | TCAAAGATCTCTAAAGATGGGGG | 8063 |
| hs132671381 | CTTGAACAGAGCTTTTTACGAGG | 8064 |
| hs132670150 | ACTATGCCTTGTCATCTCGAAGG | 8065 |
| hs132671339 | AGAGACAGCAAACAATGTTGAGG | 8066 |
| hs132671093 | GTACATAGCAGTATCCCACTTGG | 8067 |
| hs132670415 | ATCATGCTGCATAAAACCAGTGG | 8068 |
| hs132670902 | ATACTCAGCTACAAGTGGGTCGG | 8069 |
| hs132670776 | GTATACTTGTGTGCTGTGAGAGG | 8070 |
| hs132671875 | AGTAAACTAGCCAAGGATGGAGG | 8071 |
| hs132670186 | TTGCTCTTACACATTTTTGGGGG | 8072 |
| hs132671693 | GAGGGACAAGTTGTGCCAGGAGG | 8073 |
| hs132671733 | TCAAACGACAGTAAAAGTGAAGG | 8074 |
| hs132671809 | CATGCACGTGTTTTCCATAGGGG | 8075 |
| hs132670629 | GGATATCTATCCTTGCCTTGAGG | 8076 |
| hs132671397 | ATAAAAGAATGAGTAATACAAGG | 8077 |
| hs132671288 | ATAATTGGAGTTATTCCACAGGG | 8078 |
| hs132670760 | AATTTTGATGATACACTCTGTGG | 8079 |
| hs132671722 | GCTCTTAAAAGTAGATGTAGGGG | 8080 |
| hs132671105 | GAGTTTCCAAGATCTGCTGAGGG | 8081 |
| hs132671653 | AATACATCATTTATTCCACTAGG | 8082 |
| hs132671499 | GTAGAAGTAGAAGAATCCACGGG | 8083 |
| hs132670505 | ATCCTGTTGGCTGAAAGCAGTGG | 8084 |
| hs132671129 | TGTATTATCTTACTACAACTAGG | 8085 |
| hs132671081 | ATGTTGGATATTCAAAGAGGAGG | 8086 |
| hs132670755 | GCACATTGTATGTTATACACAGG | 8087 |
| hs132670775 | TATACTTGTGTGCTGTGAGAGGG | 8088 |
| hs132671911 | TAATGGTTATAAAAAACATGAGG | 8089 |
| hs132671650 | CTAAATGCAGACACACCTAGTGG | 8090 |
| hs132670146 | TTCGAGATGACAAGGCATAGTGG | 8091 |
| hs132671537 | TAGTAGATTTGAGACCCACATGG | 8092 |
| hs132670691 | GCATTAAGCAACACCAACAAGGG | 8093 |
| hs132670736 | ATGATAAAATAAGTATCAGGCGG | 8094 |
| hs132671812 | ATAAGAGGAGAGAGCCATGTGGG | 8095 |
| hs132670863 | AGGTTCTTTATGCACTAGAGAGG | 8096 |
| hs132671471 | TCAGTGCTATCTTTACAGCATGG | 8097 |
| hs132670031 | AGCTCTTCTAGATTACTGGAAGG | 8098 |
| hs132670439 | AATTTAGTGATATATGTGAAAGG | 8099 |
| hs132671206 | CTAACATTACTAATTACTGAAGG | 8100 |
| hs132671414 | TACAATACAATCGCAAACTGGGG | 8101 |
| hs132670072 | AGAGGCTGGAGCGCTCTGCGTGG | 8102 |
| hs132671354 | TATATTTGAGACGGGAGTGGGGG | 8103 |
| hs132671212 | TTACGGACAATGATTAACACTGG | 8104 |
| hs132670623 | AGATTGATGATAATCTTGAGTGG | 8105 |
| hs132671540 | TACATGTGTTAAATCCATGTGGG | 8106 |
| hs132670106 | GCTCAAGAGGGACTTTGCTGAGG | 8107 |
| hs132671028 | GGTTTAAAGAGGCCAGTAGGTGG | 8108 |
| hs132671749 | TACCAGATATGCTATGCTAGAGG | 8109 |
| hs132670923 | GGAAAATGAGTAATTAGCAGAGG | 8110 |
| hs132671773 | CATCACTCGTTCTCCCACACAGG | 8111 |
| hs132671893 | GCCTTATAAATGTTACAGCGTGG | 8112 |
| hs132671110 | TGAGTTCGAAAAGTTATGGAGGG | 8113 |
| hs132671175 | AATCTACCAGATTTTCAACATGG | 8114 |
| hs132671536 | TTACATTGACATGCTTAAGGGGG | 8115 |
| hs132670944 | AGTATGTAACTAACTCAAGTGGG | 8116 |
| hs132671660 | GTTATAGTCCAAAAACCTAGAGG | 8117 |
| hs132671242 | AAGCAGATGATGATGCCCTATGG | 8118 |
| hs132670028 | TGAAAATTGATGTATGCATGAGG | 8119 |
| hs132670909 | AGAACATTATATAAGTACCTAGG | 8120 |
| hs132670804 | GTGATAGAATCGCATTGCAGGGG | 8121 |
| hs132670470 | TGAGAGGTGATGTAGCATCTCGG | 8122 |
| hs132670022 | AAAATGCTAGGACTGTCCACTGG | 8123 |
| hs132670990 | CTTAACATGTTCCAACCAGAAGG | 8124 |
| hs132670297 | CCCGCCTTCCTACAATGCAAGGG | 8125 |
| hs132671871 | AGAGTCGATGGAGAGTCAAGAGG | 8126 |
| hs132670534 | CTTTTTTGTAATAACTCAAGGGG | 8127 |
| hs132671902 | GAAAAAGTCACACTGAAACCAGG | 8128 |
| hs132670716 | CATATGAGTGTATACACTGAGGG | 8129 |
| hs132670258 | GAATACCAGAAAGACAGCAATGG | 8130 |
| hs132670374 | ATGGACTACGGTCATTCTAGAGG | 8131 |
| hs132671456 | ATATTGCCTCAATATTTCAAGGG | 8132 |
| hs132671476 | ACTTGAATAGTGATCACCATAGG | 8133 |
| hs132670791 | ATCTGTAGGGAACTAGAGGTGGG | 8134 |
| hs132670413 | ATTGTTATATACAGCAATGGAGG | 8135 |
| hs132670628 | GCTGATGGCATCGAATGCATTGG | 8136 |
| hs132671218 | TATATATGTACTTAGAACAAAGG | 8137 |
| hs132670332 | GTAAGAACAAAGAAATCACTAGG | 8138 |
| hs132671299 | CGAAAGTTCTTAAAGTCTAGGGG | 8139 |
| hs132671566 | GCACATAAGTGTCACAGAGTAGG | 8140 |
| hs132671086 | ACAATGCTTTCCAAATCACCAGG | 8141 |
| hs132670729 | TGAATAATGCAGAGATGCGAAGG | 8142 |
| hs132670785 | ACAGTGCTGCAAATGAATTGAGG | 8143 |
| hs132671386 | GCAGTTTATGCATCCTACAATGG | 8144 |
| hs132670676 | AGACAAAGCAAGGTTTTGTGAGG | 8145 |
| hs132670808 | ATACAGTTAGCTTATTCTGGAGG | 8146 |
| hs132670095 | TAAACTACTAAGTTTGCAGGAGG | 8147 |
| hs132671524 | ATGCAGATGATCTAGAAATGAGG | 8148 |
| hs132671690 | ACAATATGTGGACAGTCTGAGGG | 8149 |
| hs132671243 | TGTTAGCAAGAAACACCATAGGG | 8150 |
| hs132670397 | CCAATGAGAATCAATTGGAGGGG | 8151 |
| hs132670504 | GACTTTTATTACTTTCCTTGAGG | 8152 |
| hs132670474 | TTCCTAAGAGAATTAGACCAAGG | 8153 |
| hs132671355 | ATATAAGGGGCGTAGCCTGAGGG | 8154 |
| hs132671076 | AGTCTTTATGATCCATCCAGTGG | 8155 |
| hs132671157 | ATTATCTAAGATCAACACTCAGG | 8156 |
| hs132671256 | CTCTGACTGTGAGAGAATGAGGG | 8157 |
| hs132670545 | AATATGCAGCAAATATTACTGGG | 8158 |
| hs132670335 | TCTTACAAACACCCTAAAAGGGG | 8159 |
| hs132670988 | TTAACACAGTATATTAACTGTGG | 8160 |
| hs132671686 | GTAATTGGCAAACAGAGGATGGG | 8161 |
| hs132671049 | GCTGCTTCTTCATGATAGGAGGG | 8162 |
| hs132670321 | CCTTTCTCATAAAATCAAGAAGG | 8163 |
| hs132670074 | CTGAAGCCAAGTAATAGAGACGG | 8164 |
| hs132670236 | AATTAAGCCTCTGAAGTCTGTGG | 8165 |
| hs132671588 | TACTGCATCTAGCCTACATGTGG | 8166 |
| hs132671022 | AAAAACAGTTGATTAAACAATGG | 8167 |
| hs132671663 | CTAACTCAGAGCTATTAGGAGGG | 8168 |
| hs132670401 | GCTTGGACATGCAATAGAGTGGG | 8169 |
| hs132671103 | TTACATTTAGCTGTAAACAAGGG | 8170 |
| hs132671866 | AGTCTTGGTGATTTCAACGGAGG | 8171 |
| hs132670950 | TTTATCATATAAAGACCTTGAGG | 8172 |
| hs132671377 | AGAATGAAAATACTTTAGGTGGG | 8173 |
| hs132671666 | TTACTATTTTAAATACATCAGGG | 8174 |
| hs132670627 | CATTCGATGCCATCAGCACAGGG | 8175 |
| hs132671797 | TGAGAAAAATGTTTCATCAGTGG | 8176 |
| hs132670523 | AACGCTAATAAATAAGAGAGAGG | 8177 |
| hs132670434 | GCAACTGGTGTATGTTAAGGAGG | 8178 |
| hs132670854 | TTGGCTTAGCAGGTAGCAGAAGG | 8179 |
| hs132671089 | GGTTTTTGTGCAAGCCAAGTGGG | 8180 |
| hs132670240 | GCGATGTCTTCAAGGAACATAGG | 8181 |
| hs132671756 | GTTAAAAACGTATGGCATGAGGG | 8182 |
| hs132671550 | CAGGGATTAAAATTAGGCATGGG | 8183 |
| hs132671886 | GCCAATTCGAAACGTGCTAGAGG | 8184 |
| hs132670178 | AACACTTCTTATATATGCAGAGG | 8185 |
| hs132671472 | GTAAAGATAGCACTGATACATGG | 8186 |
| hs132671061 | TCTGAAGTTGACATATTTTGGGG | 8187 |
| hs132670557 | ATGGTAGCTGATTCCACTAGAGG | 8188 |
| hs132670889 | CATATAAAGTACATTCCCCAGGG | 8189 |
| hs132670375 | ATTACAAACTCTATGGACTACGG | 8190 |
| hs132670155 | CGAACTTCATCATATCAAAGAGG | 8191 |
| hs132670725 | GAGAAATCATGTTTTTGACAGGG | 8192 |
| hs132670622 | ACTGAAAACCAAATTTGCAAAGG | 8193 |
| hs132671873 | CTTTGCAAGTAAACTAGCCAAGG | 8194 |
| hs132671859 | TACACCAAGCAAAGATATAGGGG | 8195 |
| hs132671075 | CTTAGTCATAGTCCACTGGATGG | 8196 |
| hs132670822 | ATTCAGCTTCATAAGTCCCAGGG | 8197 |
| hs132670500 | ACTTTCCTTGAGGCAGAGGGTGG | 8198 |
| hs132670530 | TCACTATACTTCAGTTCTGGTGG | 8199 |
| hs132671776 | TTAATTTTGTCCATATAACAAGG | 8200 |
| hs132670169 | AGGGGTTAGAACAACTTCCATGG | 8201 |
| hs132670668 | AAACAGAAGTAGGGAAAGAGGGG | 8202 |
| hs132670166 | GCAATTTCTGAAGGTCTTAGGGG | 8203 |
| hs132670104 | TCCTGAGAACATGCTCAAGAGGG | 8204 |
| hs132670867 | CATAATAGTGTCATATGTGAAGG | 8205 |
| hs132671799 | TTCTCAGCCTCTACACTCAGCGG | 8206 |
| hs132670293 | ACCCTTGCATTGTAGGAAGGCGG | 8207 |
| hs132670794 | GATCGATCTATCTATCTGTAGGG | 8208 |
| hs132671729 | CTGAATAGTTGATGGCCACAGGG | 8209 |
| hs132670675 | CAGCAAGCAAAGACAAAGCAAGG | 8210 |
| hs132671158 | TCTAAGATCAACACTCAGGAAGG | 8211 |
| hs132670877 | TTAAAATTCCAAATAGAACAAGG | 8212 |
| hs132670174 | CTATCAAAGTCAGCATTAAGGGG | 8213 |
| hs132671819 | GTAGAGCAGGTACAGCCTGTAGG | 8214 |
| hs132671104 | AGAGTTTCCAAGATCTGCTGAGG | 8215 |
| hs132670402 | AGCTTGGACATGCAATAGAGTGG | 8216 |
| hs132670357 | TCATGAATCTCTGTCAGCCAAGG | 8217 |
| hs132671270 | TTATTGCCAAAGTTGTAAGGAGG | 8218 |
| hs132670533 | ACTTTTTTGTAATAACTCAAGGG | 8219 |
| hs132671788 | ATTGAATACAGATTGAAGCCAGG | 8220 |
| hs132670070 | GAGAAAGGCTTCCTCTGGAGAGG | 8221 |
| hs132670759 | TTGATGATACACTCTGTGGTAGG | 8222 |
| hs132670812 | TTGACACTTTCAACTCAGCATGG | 8223 |
| hs132670538 | TTGGTCACAGAAATTTCTAAGGG | 8224 |
| hs132670273 | CTTCTTAACTGGAGCATCGGAGG | 8225 |
| hs132671725 | ACATGATTAGTTATCAGGATGGG | 8226 |
| hs132671422 | AGAGACAGTGAACCAAGCATGGG | 8227 |
| hs132671820 | ACTTCAAAGGAACTCAAGACAGG | 8228 |
| hs132671629 | CTATCACATAGAGTGTTAGAGGG | 8229 |
| hs132670665 | ACTTCAACAAAACAGAAGTAGGG | 8230 |
| hs132670326 | AATTCTCCTAAATCAATGGAAGG | 8231 |
| hs132670396 | CAATGAGAATCAATTGGAGGGGG | 8232 |
| hs132670931 | TTTGTAAAGGACAAGAATAGGGG | 8233 |
| hs132670956 | AGATGACTTTGATTGATAGAGGG | 8234 |
| hs132670501 | ATAAAAGTCCTCTATCCTGTTGG | 8235 |
| hs132671036 | TTATAAGCCACAGGCAGAGAGGG | 8236 |
| hs132670059 | ATTTAGCCTTTATTTCCAGAAGG | 8237 |
| hs132671522 | GGATTTGCTACACATAAAAGAGG | 8238 |
| hs132671874 | GCAAGTAAACTAGCCAAGGATGG | 8239 |
| hs132670027 | ATACATCAATTTTCAAATAGCGG | 8240 |
| hs132670897 | ATATAGATGACAGTTTATGTTGG | 8241 |
| hs132670120 | ACAAAACCCTGTTTGTTAGGGGG | 8242 |
| hs132670742 | AGTTTTATCAGAGAGCAAGATGG | 8243 |
| hs132671867 | GTCTTGGTGATTTCAACGGAGGG | 8244 |
| hs132671035 | TATAACGTGAACGCCTTGAGAGG | 8245 |
| hs132670602 | CAACAAGAAAGTTAAGGCAAAGG | 8246 |
| hs132670292 | CTAACCCTTGCATTGTAGGAAGG | 8247 |
| hs132670234 | ACGTTATCCACAGACTTCAGAGG | 8248 |
| hs132671348 | GTTTTGAACAGAAAACCCTCAGG | 8249 |
| hs132670765 | GTTCAGTGATGAAAGTAAGGAGG | 8250 |
| hs132671458 | TATTTGTTTAAAAATTAAGACGG | 8251 |
| hs132670805 | AGTGATAGAATCGCATTGCAGGG | 8252 |
| hs132671072 | TGCTAAGTAAAAAGTTAGAAGGG | 8253 |
| hs132671705 | TCCAGCAATCCTGTGTTGGGAGG | 8254 |
| hs132670879 | AATTACATCTTCTCAACCAGTGG | 8255 |
| hs132671265 | GTCAAATTTTCTCTTCACAAAGG | 8256 |
| hs132670829 | TTATTCAGTAGGCAAGAGAAGGG | 8257 |
| hs132670404 | GGGCAGTGAGATTTCAGAGATGG | 8258 |
| hs132671166 | TTATGCTCTTATGTATAAGAGGG | 8259 |
| hs132670746 | GGAGGAAAATACAGAGACTACGG | 8260 |
| hs132671029 | CTTGGTTTAAAGAGGCCAGTAGG | 8261 |
| hs132671716 | TTTCCTTAGAATCTTTTACTCGG | 8262 |
| hs132671740 | TTTAATAAGAACAATTTCAGTGG | 8263 |
| hs132670446 | ATAAGGGAGAGAAATCCCTATGG | 8264 |
| hs132671149 | CAGGCAACCAGAAAATAAGAAGG | 8265 |
| hs132671889 | GCGTGGGAATGAAATGTGCTAGG | 8266 |
| hs132671189 | AGAATTTCATTGCCATTTTGGGG | 8267 |
| hs132671039 | GCGTTCACGTTATAAGCCACAGG | 8268 |
| hs132671594 | GCCCTGACCTGCTTAAACACCGG | 8269 |
| hs132671374 | ATAACCCTATGCTTAAGAGATGG | 8270 |
| hs132671879 | GTACACATTTTTTAGCCGATAGG | 8271 |
| hs132670239 | ACATCGCTCATTAAAAAAGGTGG | 8272 |
| hs132670958 | ATCAAAGTCATCTTTAGCATAGG | 8273 |
| hs132671892 | CCTTATAAATGTTACAGCGTGGG | 8274 |
| hs132671861 | TGCTCCTTAATCTTAGGAGGTGG | 8275 |
| hs132671464 | TAGTTATGAGGATGAGACTAGGG | 8276 |
| hs132670756 | AATGTGCTATATAAAATATGTGG | 8277 |
| hs132671340 | GTGGAAGGAGAGTTGATGGGGGG | 8278 |
| hs132670295 | CCTTGCATTGTAGGAAGGCGGGG | 8279 |
| hs132671147 | TAAGAAGGTAAAATACAGGCAGG | 8280 |
| hs132671679 | GATACTTTTAATCTAAGGAGTGG | 8281 |
| hs132670719 | CCACAAAGTTGATAGGCATAGGG | 8282 |
| hs132671498 | AGTAGAAGTAGAAGAATCCACGG | 8283 |
| hs132670747 | GGCATTGAAGAGAATTAAGTAGG | 8284 |
| hs132670030 | AATACAATATTAATTTGGTGTGG | 8285 |
| hs132670696 | CCATTCTTCTAGTTTTATGGAGG | 8286 |
| hs132671845 | CCTTCATTAAGGCATCGCTCAGG | 8287 |
| hs132670618 | GCAGGTGATATCGCTAAAGATGG | 8288 |
| hs132671842 | CCTGAGCGATGCCTTAATGAAGG | 8289 |
| hs132670778 | GGAGGATGCAGGTAGGGGAAGGG | 8290 |
| hs132670678 | GAGCTCATTGATGTCATCCAAGG | 8291 |
| hs132670708 | TGGTGAGAACTTTTAAGCGAAGG | 8292 |
| hs132670355 | CTCTGTCAGCCAAGGAATGTCGG | 8293 |
| hs132670651 | ACCAGTATCCTGATATATGTTGG | 8294 |
| hs132670409 | ACAGCAATGGAGGTAGGGCAGGG | 8295 |
| hs132671511 | CTTCATTATAACATGTCCCAAGG | 8296 |
| hs132670039 | TTCCTTTAATGCCATTGCAGAGG | 8297 |
| hs132670908 | CCAAATTTCTGAAAGATCCAAGG | 8298 |
| hs132670981 | AGCAATCAGGACTTATGCATGGG | 8299 |
| hs132670948 | TATCATATAAAGACCTTGAGGGG | 8300 |
| hs132670797 | AAGTACAATCAAATTTGAAGAGG | 8301 |
| hs132671248 | TTAAAATATACTAAGCATGTAGG | 8302 |
| hs132670077 | CTATTACTTGGCTTCAGATGGGG | 8303 |
| hs132670792 | TATCTGTAGGGAACTAGAGGTGG | 8304 |
| hs132670619 | GTAATGCATTACTCAATGGCAGG | 8305 |
| hs132671269 | TATTGCCAAAGTTGTAAGGAGGG | 8306 |
| hs132671137 | ATTACCATCTCTTTCAGGAGTGG | 8307 |
| hs132670036 | ATATTTACATACCTCTGCAATGG | 8308 |
| hs132670050 | GTAAGAAAACAAGGAGGTAGGGG | 8309 |
| hs132670177 | GCAGCCTGAGAGATGTGCGCAGG | 8310 |
| hs132671589 | CAGTATGCCTTCTTTAGGAAGGG | 8311 |
| hs132671349 | TACGCCCCTTATATTTGAGACGG | 8312 |
| hs132671273 | TAGTGTGTTAGGTTTATCAGTGG | 8313 |
| hs132670158 | AAGAGGGTAAGTGCACTGAAAGG | 8314 |
| hs132670447 | TAAGGGAGAGAAATCCCTATGGG | 8315 |
| hs132671750 | ATATCTGGTAGCAGAATTGGAGG | 8316 |
| hs132670265 | CAGAAGGCGCAGAGTTCGAATGG | 8317 |
| hs132671450 | TTACCATGATAACCCAATTGTGG | 8318 |
| hs132671205 | CATTACTAATTACTGAAGGATGG | 8319 |
| hs132671058 | CTGAGAAAATTTGCAGCACAGGG | 8320 |
| hs132671282 | TATAACACTGGACTAAGCATTGG | 8321 |
| hs132670398 | CCCAATGAGAATCAATTGGAGGG | 8322 |
| hs132671811 | ATGTGGGTGACTGTCCCCTATGG | 8323 |
| hs132671870 | AATTGAGTCTAGAGAGTCGATGG | 8324 |
| hs132671882 | AATGATAGACCTGATCCTATCGG | 8325 |
| hs132671115 | AGAGTTCAAGGTTTGCTCAAGGG | 8326 |
| hs132671350 | ACGCCCCTTATATTTGAGACGGG | 8327 |
| hs132670677 | AAGCAAGGTTTTGTGAGGCAAGG | 8328 |
| hs132671910 | TATGTAACTTCGAAAAGTGTAGG | 8329 |
| hs132670793 | ATCTATCTGTAGGGAACTAGAGG | 8330 |
| hs132671858 | GTATGCTCCTTAATCTTAGGAGG | 8331 |
| hs132671549 | GCAGGGATTAAAATTAGGCATGG | 8332 |
| hs132671848 | TGTGCTACCAGAATAGGCATTGG | 8333 |
| hs132671607 | GAGTCAATTTTTGCGAACCAAGG | 8334 |
| hs132670193 | TGATTTATTGATATTTACACAGG | 8335 |
| hs132671703 | CAGCAATCCTGTGTTGGGAGGGG | 8336 |
| hs132670767 | GGAAAGTTTAATCAATTCTGAGG | 8337 |
| hs132670274 | TGTCTTCTTAACTGGAGCATCGG | 8338 |
| hs132671112 | CTTTTCGAACTCATACAGACCGG | 8339 |
| hs132671692 | TCTGAGGGACAAGTTGTGCCAGG | 8340 |
| hs132671088 | CGGTTTTTGTGCAAGCCAAGTGG | 8341 |
| hs132670244 | GGAGAAAGGTAAAAAAATCAGGG | 8342 |
| hs132671457 | CAGTGGCCCTTGAAATATTGAGG | 8343 |
| hs132670455 | CTACCCATTAGTTCCCCCATAGG | 8344 |
| hs132670288 | TCAGTATATGAGATTGCTGTAGG | 8345 |
| hs132671387 | GATGAATGGGATCCAAGAATCGG | 8346 |
| hs132670443 | ATGTGGTATATCCTTCATAAGGG | 8347 |
| hs132671865 | TTAAGTCTTGGTGATTTCAACGG | 8348 |
| hs132671225 | TGAAATTAATGTGTGTTCAGTGG | 8349 |
| hs132671085 | GCCATCAGAGAGTAGAAGAAAGG | 8350 |
| hs132671171 | TCCCAGAACAGGTAGTGAAAGGG | 8351 |
| hs132670982 | AAGCAATCAGGACTTATGCATGG | 8352 |
| hs132671375 | AAATGGTATTACTAAAGCCATGG | 8353 |
| hs132671547 | GCACATATCCTTGCATATTGTGG | 8354 |
| hs132671582 | ATAACTGAGTCACACAACTAAGG | 8355 |
| hs132670873 | TTGTACACTTACAATATGGCAGG | 8356 |
| hs132670984 | TAAATAAATCCTTTTTGCCAGGG | 8357 |
| hs132670871 | GCATGTGGCAGTTACTTGAATGG | 8358 |
| hs132671905 | ATTTTTCTGGATCTACGTAAAGG | 8359 |
| hs132670584 | TTTTACAAATTTATTAACACGGG | 8360 |
| hs132671834 | CAGCACAAATCACAAGAGATGGG | 8361 |
| hs132670850 | AAGTGAAGTAATATTTCTATGGG | 8362 |
| hs132670646 | GTAACTTAAGTAAATGTAGGAGG | 8363 |
| hs132671428 | ATTCTAATCGATGGGTCTTGTGG | 8364 |
| hs132671096 | AAACTCTTAGATCATATGCCTGG | 8365 |
| hs132671728 | CTGTGGCCATCAACTATTCAGGG | 8366 |
| hs132671430 | AATCCATAATTCTAATCGATGGG | 8367 |
| hs132670641 | TCTTTGTCTAGCCTATCTACTGG | 8368 |
| hs132670892 | TCAAAACCTAAGCAAACCCTGGG | 8369 |
| hs132671798 | TCTCAGCCTCTACACTCAGCGGG | 8370 |
| hs132670394 | GAGGGGGAGAGATTGGAGAGAGG | 8371 |
| hs132671621 | TGAATGCCTGTTGTGTAAGAAGG | 8372 |
| hs132670229 | ATGAGAGGCATGACAGTGAATGG | 8373 |
| hs132670431 | AACTAGGTAAATTTTCTCCAAGG | 8374 |
| hs132670611 | ATATTGACTGAATTGACTGTAGG | 8375 |
| hs132671763 | ACAAAAGCACTCTGAGCTAAGGG | 8376 |
| hs132671586 | TAAGAGGCCCTTCCTAAAGAAGG | 8377 |
| hs132670301 | GTGTACTGTGCTGTTAGGCACGG | 8378 |
| hs132670511 | ATAGGAGTAATCATGCTTCAGGG | 8379 |
| hs132671739 | TGAAATTGTTCTTATTAAAGGGG | 8380 |
| hs132671823 | CTGTACCTGCTCTACTTCAAAGG | 8381 |
| hs132670282 | TGTTGTGTAGATGGGAGTGATGG | 8382 |
| hs132670502 | ATTACTTTCCTTGAGGCAGAGGG | 8383 |
| hs132670904 | TATATGTATAATTATCTTGGTGG | 8384 |
| hs132671431 | AAATCCATAATTCTAATCGATGG | 8385 |
| hs132671895 | GGTTCCATACAATATTGAAAGGG | 8386 |
| hs132671791 | CTTTAGCTTATGAAACTCATGGG | 8387 |
| hs132670788 | TATGTGATGGTACTTTCCTAAGG | 8388 |
| hs132670707 | TTGTCTATTTGACACTGGGTCGG | 8389 |
| hs132671714 | TTTTTGTTCTGAGGTTGCTGAGG | 8390 |
| hs132671445 | ACTAATGTATCACAATATGCAGG | 8391 |
| hs132670975 | ACAAGATTCCTTCATAAGGATGG | 8392 |
| hs132671488 | TCCTGGCTTCTAGGATCAAGTGG | 8393 |
| hs132671154 | TGAAGCTATCATTAGAGGAAAGG | 8394 |
| hs132671400 | TCTATTACGATGAGGTTGATGGG | 8395 |
| hs132670159 | AGAGGGTAAGTGCACTGAAAGGG | 8396 |
| hs132671662 | TCTAACTCAGAGCTATTAGGAGG | 8397 |
| hs132671517 | TGAGAGGTATGTATAACAATGGG | 8398 |
| hs132670453 | TACCCATTAGTTCCCCCATAGGG | 8399 |
| hs132670881 | TTGAAGTAGAAAATTCTGACAGG | 8400 |
| hs132670937 | ATTTACAGAAACAAACCATAGGG | 8401 |
| hs132670685 | ACTTCTGGTTATTACTGGCCCGG | 8402 |
| hs132670592 | GGGAGTTTATGGTTGTTGTAGGG | 8403 |
| hs132670372 | AGTAAACTGCTTTAGACAAGTGG | 8404 |
| hs132670828 | AGTAGGCAAGAGAAGGGCATTGG | 8405 |
| hs132671808 | GCATGCACGTGTTTTCCATAGGG | 8406 |
| hs132671787 | AACTCAAGTAAGATTGGAAGTGG | 8407 |
| hs132671019 | CCAAGTATCATTTTGAGTTGGGG | 8408 |
| hs132670898 | TAAACTGTCATCTATATTGGTGG | 8409 |
| hs132671044 | ATGTTTGTATGAACAGAGACAGG | 8410 |
| hs132671050 | AGCTGCTTCTTCATGATAGGAGG | 8411 |
| hs132670144 | TCAGAAGAGCACAAGTAAGTTGG | 8412 |
| hs132670694 | TAAGGTCCAATGAAATATGATGG | 8413 |
| hs132670655 | GTACCGAGAATTAAGAATATGGG | 8414 |
| hs132670478 | TCTGTCATGGAAAGATGCCTTGG | 8415 |
| hs132670634 | CCTTATTTCTCCTCAAGGCAAGG | 8416 |
| hs132671697 | GTTGTGCCAGGAGGGGGCAAAGG | 8417 |
| hs132670577 | CAGATAATAACATTGTGCCTAGG | 8418 |
| hs132670276 | GGTATCATACGTACACATATGGG | 8419 |
| hs132670359 | AATAACTCTGTACTGTTTGGTGG | 8420 |
| hs132671715 | GGATATCCTTTTTTGTTCTGAGG | 8421 |
| hs132670092 | AACCTAAAGGCATTTATCAAGGG | 8422 |
| hs132670552 | ATAAGTTGAAATGTACCAATGGG | 8423 |
| hs132671518 | ATGAGAGGTATGTATAACAATGG | 8424 |
| hs132671489 | GCCACTTGATCCTAGAAGCCAGG | 8425 |
| hs132671264 | TTGTGAAGAGAAAATTTGACTGG | 8426 |
| hs132670425 | GAGAACTAACAACAATAAAGAGG | 8427 |
| hs132670506 | GCTTTCAGCCAACAGGATAGAGG | 8428 |
| hs132671236 | TAGTAACTTTGTGTAAAGGTGGG | 8429 |
| hs132670795 | TGATCGATCTATCTATCTGTAGG | 8430 |
| hs132671285 | TATAACTGTAGAAATACAAAAGG | 8431 |
| hs132670296 | AGGGTTAGTGTAATATCTAAAGG | 8432 |
| hs132670740 | TCAGAGAGCAAGATGGCATAGGG | 8433 |
| hs132671202 | ACCATTTTATTTATCTGCACCGG | 8434 |
| hs132670526 | TTAATAGGATGCATAATGTCAGG | 8435 |
| hs132670700 | CTGTTACTGAAAGCATAAGATGG | 8436 |
| hs132671601 | AATTTGAATGAATTATTGGATGG | 8437 |
| hs132670939 | ATTTTCTTCTCACAGATGACTGG | 8438 |
| hs132671642 | AAAAAAGCTTTGAATAGTGTGGG | 8439 |
| hs132670563 | CATATTTTAATTTATGGACGTGG | 8440 |
| hs132670780 | ATTGAGGAGGATGCAGGTAGGGG | 8441 |
| hs132670820 | CATTCAGCTTCATAAGTCCCAGG | 8442 |
| hs132671283 | AAAAGGCTCAACTATAACACTGG | 8443 |
| hs132671130 | ACTACAACTAGGATGCCAAATGG | 8444 |
| hs132671868 | GGTGATTTCAACGGAGGGAATGG | 8445 |
| hs132671384 | TGGTCCATCGACTCGTACTCAGG | 8446 |
| hs132670287 | TGAGATTGCTGTAGGTTTCGTGG | 8447 |
| hs132671916 | ATGAAAGTAGAAACCATTACGGG | 8448 |
| hs132670816 | TTTTTGGCAATCCTTCCTAAAGG | 8449 |
| hs132671801 | TTCTTAATCACAGAGACAAATGG | 8450 |
| hs132670699 | CCTCCATAAAACTAGAAGAATGG | 8451 |
| hs132670259 | AATACCAGAAAGACAGCAATGGG | 8452 |
| hs132670650 | GTATCCTGATATATGTTGGTTGG | 8453 |
| hs132671293 | ACAAAAAACCAGAAAGAGTTGGG | 8454 |
| hs132671734 | GAGGTGTTGCTGATTAGAGTAGG | 8455 |
| hs132671196 | TTTGTGTACACATAGTGTAAAGG | 8456 |
| hs132670204 | AGGCAAATTTCTTTTTTCGTCGG | 8457 |
| hs132671410 | GAGTGAACAGCAATACTTAAGGG | 8458 |
| hs132671164 | ATAATACAAAGCACGTAAAAGGG | 8459 |
| hs132671894 | GGGTTCCATACAATATTGAAAGG | 8460 |
| hs132671592 | TTGTTTGGATCTCCACATGTAGG | 8461 |
| hs132670674 | AGTTGTTGAGAATGATTCCTAGG | 8462 |
| hs132671649 | ATAAATGTAAATTACATGCTAGG | 8463 |
| hs132670151 | TTTTCCAGTTTCTATAAAAGTGG | 8464 |
| hs132671720 | AGGCTCTTAAAAGTAGATGTAGG | 8465 |
| hs132671152 | CTATCATTAGAGGAAAGGTTGGG | 8466 |
| hs132670131 | CCAAAGGTTGAATTTTCTCTGGG | 8467 |
| hs132671074 | TTCACTTAGTCATAGTCCACTGG | 8468 |
| hs132671680 | AGTATCACTAATTTGCTTCGAGG | 8469 |
| hs132671760 | CCTAGAAATACAAATTAAGTTGG | 8470 |
| hs132671370 | TTCGTCCATCTCTTAAGCATAGG | 8471 |
| hs132671006 | ATATAAACTAGAATGATGTTTGG | 8472 |
| hs132671132 | TTAATGCACCATTTTTTCACAGG | 8473 |
| hs132671221 | TTTATATCTTAACTTTGTAGTGG | 8474 |
| hs132670837 | GGAGGAGTAGGAGAGGCGGCTGG | 8475 |
| hs132671051 | AGAAGCTGCTTCTTCATGATAGG | 8476 |
| hs132671743 | GTAACTTTATCGGTCAAAATGGG | 8477 |
| hs132671083 | TCTCTGATGGCACAGTAGCCTGG | 8478 |
| hs132670786 | TTTAAATATCTGTTATGTGATGG | 8479 |
| hs132670670 | TATATGATCTTAGAGTGTATTGG | 8480 |
| hs132671914 | TCTAAGGTTCTCTTTGACAAAGG | 8481 |
| hs132670800 | CTGCAATGCGATTCTATCACTGG | 8482 |
| hs132671239 | TATTTTTTAATCACACATGAAGG | 8483 |
| hs132670475 | GCATCTTTCCATGACAGAGCAGG | 8484 |
| hs132670438 | GTGATATATGTGAAAGGTAACGG | 8485 |
| hs132670436 | AACGGGATAAACCAAGCAACTGG | 8486 |
| hs132670208 | TTAAAATGTCTTTTATTCCAAGG | 8487 |
| hs132670078 | TCTATTACTTGGCTTCAGATGGG | 8488 |
| hs132671222 | TATAAAAGAGTTTAATTGCATGG | 8489 |
| hs132670422 | TTATAAAAGTTGAATGGCAAAGG | 8490 |
| hs132670763 | GATGAAAGTAAGGAGGAGATGGG | 8491 |
| hs132670352 | GTAAACAAACCGACATTCCTTGG | 8492 |
| hs132670349 | TGAGGTGTGGGAGGAAAAATGGG | 8493 |
| hs132670660 | TATTACATACTGTCATTCACTGG | 8494 |
| hs132670433 | CTTAACATACACCAGTTGCTTGG | 8495 |
| hs132670452 | GGGATTTCTCTCCCTTATGAAGG | 8496 |
| hs132671569 | GTACAGATCTTCAAATATCCAGG | 8497 |
| hs132671302 | ACAGAAGGAATCTTAATGTCAGG | 8498 |
| hs132671383 | ACGAGTCGATGGACCATTGTAGG | 8499 |
| hs132671389 | CTTATTACTAGCGTGATGAATGG | 8500 |
| hs132671477 | TTAAAACAGGTTTTCAAAGAGGG | 8501 |
| hs132670219 | AAGATGCCAGTATCATCAACTGG | 8502 |
| hs132671675 | GTAATTTGTTCAGTCACATCAGG | 8503 |
| hs132670581 | ATGCATGTACTTTCAGGCCTAGG | 8504 |
| hs132670600 | GTACCTCAACAAGAAAGTTAAGG | 8505 |
| hs132671131 | CTACAACTAGGATGCCAAATGGG | 8506 |
| hs132671201 | GCACATTTAACAAACTCTTAGGG | 8507 |
| hs132670848 | TGACTGTTCGTTTCGTGTGTAGG | 8508 |
| hs132670421 | TATAAAAGTTGAATGGCAAAGGG | 8509 |
| hs132671173 | AGTTGAGCCATTCCCAGAACAGG | 8510 |
| hs132670300 | TGTACTGTGCTGTTAGGCACGGG | 8511 |
| hs132671371 | TCGTCCATCTCTTAAGCATAGGG | 8512 |
| hs132670865 | TCTAATTTGTGTTAATTACTGGG | 8513 |
| hs132670940 | GGATTGTTATTTAAATTTGGTGG | 8514 |
| hs132670890 | ACATTCCCCAGGGTTTGCTTAGG | 8515 |
| hs132671677 | AGTCACATCAGGATGTATAAAGG | 8516 |
| hs132671754 | TTAAATGAGTTAAAAACGTATGG | 8517 |
| hs132671099 | GGTCTGAGTTTCTCTCTGCTTGG | 8518 |
| hs132671512 | TTAGGTGTCTCTGGGAACTCTGG | 8519 |
| hs132670661 | GAGTTCTTATGGCAGCAGTCAGG | 8520 |
| hs132671052 | TCAAAGATATACTCAAAGATTGG | 8521 |
| hs132671318 | GTCTCAGTATACTGTGAAAAGGG | 8522 |
| hs132671238 | TTTATAGTAACTTTGTGTAAAGG | 8523 |
| hs132670067 | GGAGGTCGATTAGAAAAATCTGG | 8524 |
| hs132670253 | TCAATGGTTTGGAAGCTACTAGG | 8525 |
| hs132671696 | GGACAAGTTGTGCCAGGAGGGGG | 8526 |
| hs132670105 | TTCTCAGGATTTTTGAAGCCCGG | 8527 |
| hs132670591 | TTATGGTTGTTGTAGGGCAGTGG | 8528 |
| hs132670403 | GATTTCAGAGATGGCTAGCTTGG | 8529 |
| hs132671641 | TGATAATTCTAAATAAGAATAGG | 8530 |
| hs132670248 | GTATGATACGACTGTTAACCTGG | 8531 |
| hs132671795 | ATTCTGTGTCTTTCATTACCTGG | 8532 |
| hs132670141 | GTTGGTGCTGGCAGCTTAGTGGG | 8533 |
| hs132670947 | GAGAAACAATAAACCAATGATGG | 8534 |
| hs132671435 | GTTAACTTGCTAAAATTCATGGG | 8535 |
| hs132670959 | TCAGTTGGATTTCTTTCAAAGGG | 8536 |
| hs132671240 | ATTTTTAGAATAATGATATGAGG | 8537 |
| hs132670993 | TTCTCAGTCAAGCAGAACTCTGG | 8538 |
| hs132670451 | ATCCCTATGGGGGAACTAATGGG | 8539 |
| hs132671637 | AATAATTCAGAGGACAAAACAGG | 8540 |
| hs132670632 | CTTGCCTTGAGGAGAAATAAGGG | 8541 |
| hs132670721 | TCTCAGTCCACAAAGTTGATAGG | 8542 |
| hs132671466 | CTATTCGAAGTTATACATATGGG | 8543 |
| hs132670687 | TCAACAATTTATTCATAAAGTGG | 8544 |
| hs132671427 | CGATGGGTCTTGTGGAATAGTGG | 8545 |
| hs132670639 | GTAAGATATCCATAATCAATTGG | 8546 |
| hs132670081 | ACTACCCCGTCTCTATTACTTGG | 8547 |
| hs132670861 | CTTTAAGACACAGTAGAGATAGG | 8548 |
| hs132671167 | GTTATGCTCTTATGTATAAGAGG | 8549 |
| hs132671440 | TATGTTGTCAGAAACATCTAAGG | 8550 |
| hs132671013 | CCCCAACTCAAAATGATACTTGG | 8551 |
| hs132670496 | ATACCATTCTTTGAAATGGCAGG | 8552 |
| hs132670026 | AACAGCAGATACAGACAATAGGG | 8553 |
| hs132671442 | TCTAGAATGACTGGTTTAGATGG | 8554 |
| hs132670101 | TGTACTCCTTGCAGGTCGCCGGG | 8555 |
| hs132671667 | TTTTAAATACATCAGGGCTTAGG | 8556 |
| hs132670749 | AATAATCACTTACTAAAAATGGG | 8557 |
| hs132671612 | TGTCTCTTGATACCAGAGATAGG | 8558 |
| hs132671824 | TGAGCTTTCACTGCCCCTACAGG | 8559 |
| hs132670400 | GTGACCCAATGAGAATCAATTGG | 8560 |
| hs132670272 | CCAGTTAAGAAGACAAAAATGGG | 8561 |
| hs132670210 | GGAAATAAAGATATAAAAAGTGG | 8562 |
| hs132670205 | TATATTTTCCATAGAGACCTTGG | 8563 |
| hs132670945 | CAAGTGGGCTCATCCATCATTGG | 8564 |
| hs132670683 | ATAAACTGAAAGTCAAATGTAGG | 8565 |
| hs132670733 | GCAGGTTATCATATGAATAGTGG | 8566 |
| hs132671271 | GTTTTATTGCCAAAGTTGTAAGG | 8567 |
| hs132671900 | TGTTTAGTACTTTCTATATGAGG | 8568 |
| hs132671214 | TAATAGAGAAAACTGAAGATAGG | 8569 |
| hs132671509 | TTTCAGCCAAAAATTTCCTTGGG | 8570 |
| hs132671470 | ATAATACTAAACACTTACATAGG | 8571 |
| hs132671027 | ACAAAAATGTTGCCACCTACTGG | 8572 |
| hs132670864 | GTGTTACTTGACTTGTCCTCAGG | 8573 |
| hs132670644 | AGAAGAGCTTGAAAATCATATGG | 8574 |
| hs132671918 | ATAAATATGAATTCCCGTAATGG | 8575 |
| hs132671291 | AGTAAAGAACATTTACTGAATGG | 8576 |
| hs132671478 | GTTAAAACAGGTTTTCAAAGAGG | 8577 |
| hs132670773 | AGAAATAATACATAGAATTACGG | 8578 |
| hs132670388 | GGAGTCTTGGATCAAATAACAGG | 8579 |
| hs132671516 | TTATACATACCTCTCATCATTGG | 8580 |
| hs132670762 | ATGATGTTAATATTTCAGATTGG | 8581 |
| hs132670935 | ATTCAGCTTATTAAACCCTATGG | 8582 |
| hs132670042 | TGGAAATATTTCATTACCTAGGG | 8583 |
| hs132670471 | TTTTACCTTATACTGATATGAGG | 8584 |
| hs132670616 | GCTAAAAACAAAGGACTTTGAGG | 8585 |
| hs132671268 | TGACTCCCTCCTTACAACTTTGG | 8586 |
| hs132670571 | GAAACTGTAAATCTGGAATAGGG | 8587 |
| hs132670279 | TCTATAGCCTATTAAACAAAAGG | 8588 |
| hs132670325 | GGCAAATTCTCCTAAATCAATGG | 8589 |
| hs132670423 | GTGATTTTATAAAAGTTGAATGG | 8590 |
| hs132671324 | AATAAGACTGTCTTCACAACTGG | 8591 |
| hs132670809 | CTAACTGTATTTGGAAATCAGGG | 8592 |
| hs132671475 | CCATAGGATTAATAAAACTTAGG | 8593 |
| hs132671495 | TTTGGTACCTCAAATAGTTCAGG | 8594 |
| hs132670608 | TCACACAAAATAACTAAAATGGG | 8595 |
| hs132670706 | CATTTTGTCTATTTGACACTGGG | 8596 |
| hs132670713 | AAATGCTTCAAATTATACTTAGG | 8597 |
| hs132671913 | TCTTTGACAAAGGCTGCTAATGG | 8598 |
| hs132670705 | ACATTTTGTCTATTTGACACTGG | 8599 |
| hs132670724 | TGAGAAATCATGTTTTTGACAGG | 8600 |
| hs132670118 | GTGCTTGCTTGCAATATTTGTGG | 8601 |
| hs132670519 | CATGCTTCCATTTCCTCAGTTGG | 8602 |
| hs132670522 | TTTCTATGTTCACCTCACTTAGG | 8603 |
| hs132670915 | GGTCAATTTTGAAGATAAATGGG | 8604 |
| hs132670726 | ACAGGGCTTGTTTCTCAAGTTGG | 8605 |
| hs132671869 | GTTGAAATCACCAAGACTTAAGG | 8606 |
| hs132670750 | GTATGTTAGTTAAATACTAATGG | 8607 |
| hs132670771 | ATAGAATTACGGCTGATTATGGG | 8608 |
| hs132670507 | TTCCACTGCTTTCAGCCAACAGG | 8609 |
| hs132671493 | ACTTGTTCCTGAACTATTTGAGG | 8610 |
| hs132670122 | TTACAAAACCCTGTTTGTTAGGG | 8611 |
| hs132671814 | AAAATAACGTTCTCTATAAGAGG | 8612 |
| hs132671047 | TTTGTCACAAAAGTGCTTTAGGG | 8613 |
| hs132671432 | GCTCATCTTAGACAGCTATATGG | 8614 |
| hs132670251 | ATTTCCACAAATTCAATCAATGG | 8615 |
| hs132670751 | TATGTTAGTTAAATACTAATGGG | 8616 |
| hs132670657 | CAGCCCATATTCTTAATTCTCGG | 8617 |
| hs132670579 | TATTATCTGAAAAGCTTGATAGG | 8618 |
| hs132671741 | GAGAGAGCATGTAACTTTATCGG | 8619 |
| hs132671860 | ATACACCAAGCAAAGATATAGGG | 8620 |
| hs132671462 | GATTTAGAGTTCTAGTTATGAGG | 8621 |
| hs132670323 | CCTTCTTGATTTTATGAGAAAGG | 8622 |
| hs132670541 | ATATTATAAACATATAAAATTGG | 8623 |
| hs132670247 | AGAATTTCTCTGACTAGAAATGG | 8624 |
| hs132670917 | TTTAAAATAACATTTATATAGGG | 8625 |
| hs132671885 | TCCTCTAGCACGTTTCGAATTGG | 8626 |
| hs132670201 | GTATATGTATATATGTTCTAAGG | 8627 |
| hs132671827 | AGATGATGTTACATGTAGTTAGG | 8628 |
| hs132671482 | GCAATTCTTGCATCATGTATTGG | 8629 |
| hs132671771 | GGAGAACGAGTGATGTAATTTGG | 8630 |
| hs132671358 | CACTCCCGTCTCAAATATAAGGG | 8631 |
| hs132670932 | CTTTGTAAAGGACAAGAATAGGG | 8632 |
| hs132671718 | ATACCGAGTAAAAGATTCTAAGG | 8633 |
| hs132671023 | TTACGAGTACCAACACTATTAGG | 8634 |
| hs132670587 | AGCAATGTTGGCCAACTATACGG | 8635 |
| hs132670874 | TTCATTGTACACTTACAATATGG | 8636 |
| hs132671561 | AATGAAATTTCAAATCCATTTGG | 8637 |
| hs132670311 | TCCATTTTCAAGGTATTGATTGG | 8638 |
| hs132670710 | TTTCTACTCAAGTCAGATAATGG | 8639 |
| hs132670562 | GGCTTTATATTACACTAAAAAGG | 8640 |
| hs132670190 | CTTAAATACGAGCTAGGTTAAGG | 8641 |
| hs132671505 | GAAAGAGGACTACATATCTTAGG | 8642 |
| hs132671534 | CTTTACATTGACATGCTTAAGGG | 8643 |
| hs132670992 | GCAGAACTCTGGACACCTTCTGG | 8644 |
| hs132670485 | AGAATCTCTTTCCTTGAATAGGG | 8645 |
| hs132670477 | TGCCTTGGTCTAATTCTCTTAGG | 8646 |
| hs132670112 | TGAGCAGAACAAACAAATATTGG | 8647 |
| hs132670093 | TGCCCTTGATAAATGCCTTTAGG | 8648 |
| hs132671857 | GGTGTATGCTCCTTAATCTTAGG | 8649 |
| hs132670331 | TTTCTCAGAAATTTATTAGATGG | 8650 |
| hs132671134 | ATAGCAAGCCTGTGAAAAAATGG | 8651 |
| hs132670821 | TGGAGAGGCACTTTGCCTTTAGG | 8652 |
| hs132670758 | CAGAGTGTATCATCAAAATTAGG | 8653 |
| hs132671136 | AGGAGTGGAAGAGAGAGAATTGG | 8654 |
| hs132671644 | ATTTCCTAACCTATTTTGATAGG | 8655 |
| hs132670058 | ATGCTGTTAGAAATTTTAGATGG | 8656 |
| hs132671619 | TTTATAAATATAATGCAAAATGG | 8657 |
| hs132670238 | AAGACATCGCTCATTAAAAAAGG | 8658 |
| hs132671712 | CAGCAACCTCAGAACAAAAAAGG | 8659 |
| hs132670099 | GGGAGGAGTGTACTCCTTGCAGG | 8660 |
| hs132670986 | GTTCTATGTCCCTGGCAAAAAGG | 8661 |
| hs132671046 | GTTCATACAAACATTCGATTTGG | 8662 |
| hs132670636 | TTTTAGTATCTACTCATTAGAGG | 8663 |
| hs132670154 | TCTGCCACTTTTATAGAAACTGG | 8664 |
| hs132671678 | TTAGTGATACTTTTAATCTAAGG | 8665 |
| hs132670680 | TGACTTTCAGTTTATTTAACAGG | 8666 |
| hs132671043 | TTTGGAGTAAAAATACAAATTGG | 8667 |
| hs132671460 | TATGGTGCAATTTTTTTCATTGG | 8668 |
| hs132671448 | TATCATGGTAAAGAGCTTTATGG | 8669 |
| hs132671069 | ATATAATATCTGTTTCAATTTGG | 8670 |
| hs132670686 | AAGTGGCTGCAAATATAATTTGG | 8671 |
| hs132670029 | TTAAAGCTCTTCTAGATTACTGG | 8672 |
| hs132670207 | CTTTTATTCCAAGGTCTCTATGG | 8673 |
| hs132671425 | AGACCCATCGATTAGAATTATGG | 8674 |
| hs132671673 | TTTAGCTCAACTCTATAAATTGG | 8675 |
| hs132671738 | CTGAAATTGTTCTTATTAAAGGG | 8676 |
| hs132670559 | AACTCAGTACATATTCTATTTGG | 8677 |
| hs132670640 | ATAAGTTTACCAATTGATTATGG | 8678 |
| hs132670922 | GCAGAGGTGCAGATTATATTTGG | 8679 |
| hs132670308 | TTTTATATAAAACCTGAAATTGG | 8680 |
| hs132671784 | ACAAAGAGTTGAAAATTAATTGG | 8681 |
| hs132671295 | GTTAAGTGAATGAACAAAATTGG | 8682 |
| hs132670369 | TTAATCAGTCATTTATAAATAGG | 8683 |
| hs132671496 | TTAAAGTCATTTTAACTATTTGG | 8684 |
| hs132671617 | TTACATTTGGTAAAGATATTTGG | 8685 |
| hs132670429 | GTTTGGTTCAATTAGATTTTAGG | 8686 |
| hs132671286 | GCTTCATGATATGGTATAATTGG | 8687 |
| hs132670723 | TTTACTGATGTTTTTCTAAATGG | 8688 |
| hs132669975 | TCATGTACCCCTGACAAAGAAGG | 8689 |
| hs132669980 | GTTAACTTCCTTCTTTGTCAGGG | 8690 |
| hs132670000 | AGGATGTAAGAGAGTAATTGAGG | 8691 |
| hs132669977 | TCTTTGTCAGGGGTACATGATGG | 8692 |
| hs132669986 | CTGGGAATATAAATCTAAATGGG | 8693 |
| hs132669982 | AATTAGAACTCTAGGTAAATCGG | 8694 |
| hs132669985 | AGATTTATATTCCCAGTAAAAGG | 8695 |
| hs132669674 | CTACTGCTTAATCACCCATGGGG | 8696 |
| hs132669542 | AACATGAACCAGATGCACAGAGG | 8697 |
| hs132669647 | AATAACATAAAGAAGCTGCGTGG | 8698 |
| hs132669873 | TGGAAACCTAGAGTGCACAAAGG | 8699 |
| hs132669493 | ATAGACTTTATAAAACCTAGAGG | 8700 |
| hs132669226 | GGCCTAGGTTCACAGCCCAGCGG | 8701 |
| hs132669877 | CACAAAGGAGAAGACACTGGTGG | 8702 |
| hs132669704 | AGAGTCAAATAGACACTTGGGGG | 8703 |
| hs132669332 | TAATTCATAGTAATCTCCTGGGG | 8704 |
| hs132669518 | GCTCAAAAATTCTAGCAAGGTGG | 8705 |
| hs132669812 | AGGGTTTGGATAGATCCAGTCGG | 8706 |
| hs132669466 | AGATACGTTTTCATGTCCGGGGG | 8707 |
| hs132669451 | TGACTGGCAATAGAGAGCCGAGG | 8708 |
| hs132669209 | AAGCCCACTATCAGTCACCCCGG | 8709 |
| hs132669349 | GAAGAACCTAAGGATTGTGGAGG | 8710 |
| hs132669876 | GTGCACAAAGGAGAAGACACTGG | 8711 |
| hs132669902 | TCACTACCCCTAGATGTGAGAGG | 8712 |
| hs132669212 | TCTGAGAAATAATAGTTCCGGGG | 8713 |
| hs132669230 | TGGTTGTAGAGCTTACCGCTGGG | 8714 |
| hs132669579 | GAAGTCTTACACATTTGAGGGGG | 8715 |
| hs132669336 | ACACTTCTCTCTGTAAGTGGAGG | 8716 |
| hs132669696 | GAGGTGCTGAACAAATGAGTGGG | 8717 |
| hs132669288 | TTAGAGACACATTTACCATGAGG | 8718 |
| hs132669677 | ATGTTGATATCATACCCCATGGG | 8719 |
| hs132669738 | GCTGTGGAATACACTTGGGATGG | 8720 |
| hs132669396 | ATTAGCAAGGAAGTGAGTAGTGG | 8721 |
| hs132669302 | CAGAGCTCAAGAAATCTCTGTGG | 8722 |
| hs132669363 | CTATTAAATATGATCAAGAGTGG | 8723 |
| hs132669276 | ATAAAATTACAGGGAAACAGGGG | 8724 |
| hs132669920 | TTAAAAAAAAAAAAGGACCAAGG | 8725 |
| hs132669882 | TGGCAAGGACAGTAAAGAGGTGG | 8726 |
| hs132669859 | GGCAGACATCCCTTGAAGGGGGG | 8727 |
| hs132669904 | TTATTCGCCTGCTGTGATCGTGG | 8728 |
| hs132669683 | ATTTTTCTATCAAGTGACGTGGG | 8729 |
| hs132669387 | GACGCTTCCTTCCTTCACTGAGG | 8730 |
| hs132669580 | TGAAGTCTTACACATTTGAGGGG | 8731 |
| hs132669858 | TGGCAGACATCCCTTGAAGGGGG | 8732 |
| hs132669697 | GGAGGTGCTGAACAAATGAGTGG | 8733 |
| hs132669901 | ATTGTACCTCTCACATCTAGGGG | 8734 |
| hs132669756 | ATAAAAGCAACAGAATTGGAGGG | 8735 |
| hs132669273 | ACTCTTCATATAAAATTACAGGG | 8736 |
| hs132669832 | CATACATAGTCAAAGTGGCAAGG | 8737 |
| hs132669506 | AAAATACACCTAATAAAAGGAGG | 8738 |
| hs132669842 | TTATGTCAATCTCAGCTAGGTGG | 8739 |
| hs132669795 | ACTTGAATAATAGTAACTGTGGG | 8740 |
| hs132669607 | TTGGAGAATGAAGTGAGGCAAGG | 8741 |
| hs132669399 | CCATTGCAAGGCTGAACCAGAGG | 8742 |
| hs132669864 | GTTGCAATTTTAATTCCAGGAGG | 8743 |
| hs132669295 | TGATCGCACAAGGTGCAGGATGG | 8744 |
| hs132669473 | AACTCTGTTAGAATGTAGGAAGG | 8745 |
| hs132669739 | TAATGCTGTGGAATACACTTGGG | 8746 |
| hs132669326 | AAGATATTAACATTAATAGGAGG | 8747 |
| hs132669860 | GGATGTCTGCCATTAAGTGAAGG | 8748 |
| hs132669722 | AGAAACTAAAACTTCTGTGACGG | 8749 |
| hs132669871 | GAGCATTTAGCCTCCAGGAGAGG | 8750 |
| hs132669300 | GTGGACCCACAGATTAAGGTAGG | 8751 |
| hs132669307 | ATAGAACATGAAAGATTACTGGG | 8752 |
| hs132669913 | TATAGTGTGAAATTATGGAGGGG | 8753 |
| hs132669735 | AATACACTTGGGATGGTAGGAGG | 8754 |
| hs132669831 | GAACACATACATAGTCAAAGTGG | 8755 |
| hs132669590 | TACAGCTTCACAGATGCTGAGGG | 8756 |
| hs132669277 | TTTTATATGAAGAGTGTGAGTGG | 8757 |
| hs132669695 | ACGCAAACTTCACTGCACTTGGG | 8758 |
| hs132669210 | GTTCCGGGGTGACTGATAGTGGG | 8759 |
| hs132669805 | TTTCTCTAATCGCTAAACCAAGG | 8760 |
| hs132669643 | AAACTGTTCAGCTATATGGATGG | 8761 |
| hs132669596 | ATCTAGTTACTGAGGCAAGTAGG | 8762 |
| hs132669494 | AAAACTTACAAATTACCAAGAGG | 8763 |
| hs132669261 | GGATGCTGCATACTATTGGCAGG | 8764 |
| hs132669758 | GGAGGGAAAATACAATAGCAAGG | 8765 |
| hs132669224 | GTAATGAATTTAAAGTCCAAAGG | 8766 |
| hs132669376 | AGATTTATGTGACACTGGCAGGG | 8767 |
| hs132669428 | ATAGTGGTAGGTTAAAGAGCTGG | 8768 |
| hs132669319 | CATCTGGTTGGGGATTTTTGGGG | 8769 |
| hs132669378 | ACTGGCAGGGAAGTATCAAAGGG | 8770 |
| hs132669939 | AAAGGCACAGAAGCATGCACAGG | 8771 |
| hs132669715 | TTTTGGTTTATATCAGCAGGAGG | 8772 |
| hs132669592 | GTAGGTAAACTAGGCCAGTAGGG | 8773 |
| hs132669283 | ATAGCTGGTCCGAAGTATTGGGG | 8774 |
| hs132669395 | AGTTTTCTGGGTGATTAGCAAGG | 8775 |
| hs132669208 | GCATCTATTGGACATTGAGAAGG | 8776 |
| hs132669483 | ATGTCATTCCTCATAGACATTGG | 8777 |
| hs132669206 | TATGGAATGTTCGCATTTGGGGG | 8778 |
| hs132669482 | TCATTCCTCATAGACATTGGAGG | 8779 |
| hs132669801 | ACTAAAACTAAACAGAGAAGTGG | 8780 |
| hs132669427 | TTATTTCTGAGGATAGTGGTAGG | 8781 |
| hs132669667 | ACATTCGGTTAGGTTGCACATGG | 8782 |
| hs132669840 | AAGCTCTTGAATCTTCCCTAAGG | 8783 |
| hs132669586 | GAACTAGAGGACAATAGCGATGG | 8784 |
| hs132669609 | ATGAACACATTAGTTTTAGGGGG | 8785 |
| hs132669275 | TATAAAATTACAGGGAAACAGGG | 8786 |
| hs132669893 | TTAGTGGACCTGGTAAACACTGG | 8787 |
| hs132669622 | TAATAACTATGGCAATTAGTGGG | 8788 |
| hs132669569 | TGTTGCATGGCAATAATGAATGG | 8789 |
| hs132669467 | CAGATACGTTTTCATGTCCGGGG | 8790 |
| hs132669825 | AAAACGTGATTATGAAAAGAGGG | 8791 |
| hs132669388 | TCACAGGCCTCAGTGAAGGAAGG | 8792 |
| hs132669834 | AAAAGTCTATGTGATAGAAGTGG | 8793 |
| hs132669373 | TACCTTAAGTAGACTAGCAGTGG | 8794 |
| hs132669423 | TTTTTAACATAACCTTGCCAAGG | 8795 |
| hs132669630 | TTTCTGAACTATTTACTGTGAGG | 8796 |
| hs132669720 | TAAAACTTCTGTGACGGTAAGGG | 8797 |
| hs132669655 | GCAGATGTCATCAGGAGCCAAGG | 8798 |
| hs132669221 | CTATTTTCTATATCTTTGTGGGG | 8799 |
| hs132669570 | GGCAATAATGAATGGTCCATAGG | 8800 |
| hs132669299 | CATAGCCTACCTTAATCTGTGGG | 8801 |
| hs132669625 | ACCCTGCAACCTGATCTTGGAGG | 8802 |
| hs132669894 | TAGTGGACCTGGTAAACACTGGG | 8803 |
| hs132669600 | CTGCAAAGCCTGACACTGCATGG | 8804 |
| hs132669432 | GCACAGTCTTGGGTCACACAGGG | 8805 |
| hs132669218 | ACAAAGATATAGAAAATAGTGGG | 8806 |
| hs132669685 | AACAGAAGATATCTAAGTAGAGG | 8807 |
| hs132669744 | ATTGGCTTACTCCTCTTAAGGGG | 8808 |
| hs132669271 | TGGTATGTAACATTACATACAGG | 8809 |
| hs132669285 | TGATAACAACCCCAATACTTCGG | 8810 |
| hs132669397 | GCTAATCACCCAGAAAACTCTGG | 8811 |
| hs132669398 | GTGAGTAGTGGTCCATTGCAAGG | 8812 |
| hs132669263 | TATCCTCATACACTAATGCCAGG | 8813 |
| hs132669619 | GATGTCAGCATACTTCGTGTTGG | 8814 |
| hs132669338 | ACTGCCAACTGCCAAAGAATGGG | 8815 |
| hs132669389 | AAAGAGCATCAGTAAAGTGCAGG | 8816 |
| hs132669293 | CAGTGCAGCTTGATCGCACAAGG | 8817 |
| hs132669589 | TGAAGCTGTAGAAACCCTACTGG | 8818 |
| hs132669591 | CTACAGCTTCACAGATGCTGAGG | 8819 |
| hs132669422 | ATATTAGTTGTAAAATACACTGG | 8820 |
| hs132669767 | TTGCAGTTATTTTTTCACAATGG | 8821 |
| hs132669462 | GAGAGCTGTCATCCCACCCCCGG | 8822 |
| hs132669678 | TATGTTGATATCATACCCCATGG | 8823 |
| hs132669322 | TTTTGGGGTAGGGACCAGAATGG | 8824 |
| hs132669673 | GCTACTGCTTAATCACCCATGGG | 8825 |
| hs132669535 | TGCCACTTGTGAGGACCCAAGGG | 8826 |
| hs132669324 | GGGTAGGGACCAGAATGGCTGGG | 8827 |
| hs132669684 | TATTTTTCTATCAAGTGACGTGG | 8828 |
| hs132669420 | GAGTGGGGAGGTTAACCTCTGGG | 8829 |
| hs132669238 | AATTACACAACTTTATGTTGAGG | 8830 |
| hs132669841 | TTTTTATGTCAATCTCAGCTAGG | 8831 |
| hs132669645 | TAATATTTTTCAACTATCCGAGG | 8832 |
| hs132669201 | GTAATAAGTTGCTTTCAAAGAGG | 8833 |
| hs132669845 | TTAGCATTTCCATTCTCTAGTGG | 8834 |
| hs132669350 | ATCACACCTCCACAATCCTTAGG | 8835 |
| hs132669593 | AGTAGGTAAACTAGGCCAGTAGG | 8836 |
| hs132669434 | TGCACAGTCTTGGGTCACACAGG | 8837 |
| hs132669461 | TTTTGCCTATACCTACTGTCAGG | 8838 |
| hs132669914 | TTATAGTGTGAAATTATGGAGGG | 8839 |
| hs132669670 | CTATTGGACTAATAAGAAGTAGG | 8840 |
| hs132669289 | TCTGATTGCAATGTTCCTCATGG | 8841 |
| hs132669856 | AATGGCAGACATCCCTTGAAGGG | 8842 |
| hs132669627 | ACCTCCAAGATCAGGTTGCAGGG | 8843 |
| hs132669809 | AGGAAATAATGGCTTCCGACTGG | 8844 |
| hs132669560 | ATGAGTCTCGAAGTTTATTGTGG | 8845 |
| hs132669260 | GTGTGGATGCTGCATACTATTGG | 8846 |
| hs132669503 | GCCAGTAACTGTGAATTCTAGGG | 8847 |
| hs132669527 | GTGATAGTTTGAATAAAAGCCGG | 8848 |
| hs132669915 | ATTATAGTGTGAAATTATGGAGG | 8849 |
| hs132669382 | CTTTACTGAAGGGCATACTTGGG | 8850 |
| hs132669789 | AATCCTCTCCAGTTTGCCTAAGG | 8851 |
| hs132669814 | TTCTCTCTCTACCTAAGACAGGG | 8852 |
| hs132669386 | TGAAATAACTAGTAATGAAGAGG | 8853 |
| hs132669903 | ATCATCACCACGATCACAGCAGG | 8854 |
| hs132669548 | TTTTTATTTGTAATTTCTGGGGG | 8855 |
| hs132669479 | TTTGTCCTCCAATGTCTATGAGG | 8856 |
| hs132669400 | AGAGGAAGAAGCAAAATTGAAGG | 8857 |
| hs132669740 | TTAATGCTGTGGAATACACTTGG | 8858 |
| hs132669608 | TGCCTCACTTCATTCTCCAATGG | 8859 |
| hs132669425 | AGTATTATAAATCTTTACCTTGG | 8860 |
| hs132669924 | AATGTATTCAAATCCACAGTTGG | 8861 |
| hs132669357 | GCAAATAGTAGTCCATATGCTGG | 8862 |
| hs132669613 | GGAAAGAAGGTGCTGTAAAGAGG | 8863 |
| hs132669846 | TAGCATTTCCATTCTCTAGTGGG | 8864 |
| hs132669367 | ATTTTGTCCTATAGGAAGGAAGG | 8865 |
| hs132669705 | ATTTGACTCTGGAAATAAGATGG | 8866 |
| hs132669806 | TAATCGCTAAACCAAGGCTTAGG | 8867 |
| hs132669779 | CTGAGGCAATTAGAAAAGGCTGG | 8868 |
| hs132669543 | CCAGATGCACAGAGGTAACATGG | 8869 |
| hs132669287 | TTATTGTAAACACTCTCAAAAGG | 8870 |
| hs132669621 | GATACATGACATGCTCTCCTTGG | 8871 |
| hs132669930 | ATATTGACTTAATAAAAAAGAGG | 8872 |
| hs132669384 | CCCTTCCTTACTTTACTGAAGGG | 8873 |
| hs132669818 | TCCAAGTTGAAGCTAATCATTGG | 8874 |
| hs132669750 | GTTTTGTAATTGACCAGTATCGG | 8875 |
| hs132669337 | GACTGCCAACTGCCAAAGAATGG | 8876 |
| hs132669290 | AGATGAGATATCCATTTAAGTGG | 8877 |
| hs132669445 | CTTCAAGTCGTCATTTAGACGGG | 8878 |
| hs132669364 | CCCTAAACCTTCCTTCCTATAGG | 8879 |
| hs132669617 | ATACTTCGTGTTGGGAAAGAAGG | 8880 |
| hs132669838 | GAATAATTATTAAGAAGGCAAGG | 8881 |
| hs132669932 | TTTGAATAATGTTTTTCAAGAGG | 8882 |
| hs132669616 | GTATGCTGACATCTTGGGCTAGG | 8883 |
| hs132669444 | CCTTCAAGTCGTCATTTAGACGG | 8884 |
| hs132669379 | GTATGCCCTTCAGTAAAGTAAGG | 8885 |
| hs132669348 | CTGTTTTCAAACTTGTTCTGAGG | 8886 |
| hs132669891 | TAATAGATGGAGTAAATTAGTGG | 8887 |
| hs132669488 | CTATTAGGACCATCAAATACAGG | 8888 |
| hs132669475 | TTGGTAATCTAATTATCTGTCGG | 8889 |
| hs132669453 | GCAATAGAGAGCCGAGGGAGTGG | 8890 |
| hs132669294 | AGCTTGATCGCACAAGGTGCAGG | 8891 |
| hs132669861 | TCAAAAATTCCCCCCTTCAAGGG | 8892 |
| hs132669909 | ATAAGGTACATGTAAGATAGAGG | 8893 |
| hs132669749 | CATTTAAATCATATAAACATTGG | 8894 |
| hs132669745 | TTTTGTTAGAACCCCTTAAGAGG | 8895 |
| hs132669852 | ATCCCCATCCCACTAGAGAATGG | 8896 |
| hs132669672 | TGCTACTGCTTAATCACCCATGG | 8897 |
| hs132669524 | ATTGAGGTAATGTTTAAGTCCGG | 8898 |
| hs132669539 | CCAGACAACATGACTTGTTAGGG | 8899 |
| hs132669633 | TCATTTCTAGTTGTTGGATGGGG | 8900 |
| hs132669497 | TGTGAGCTCTTTAGGAAGACAGG | 8901 |
| hs132669231 | CTGGTTGTAGAGCTTACCGCTGG | 8902 |
| hs132669917 | GCATATCTAATGAGTTTCCTTGG | 8903 |
| hs132669225 | AATTTAAAGTCCAAAGGCCTAGG | 8904 |
| hs132669284 | CCAATACTTCGGACCAGCTATGG | 8905 |
| hs132669731 | TGGAAGTGCAAGAAGACAACTGG | 8906 |
| hs132669639 | TTTCTCACATTCCATTAAGTAGG | 8907 |
| hs132669470 | ATGAACATAAAGGAATTCAATGG | 8908 |
| hs132669668 | TGATAACGTGACATTCGGTTAGG | 8909 |
| hs132669402 | CCTCTGGTTCAGCCTTGCAATGG | 8910 |
| hs132669321 | GGTTGGGGATTTTTGGGGTAGGG | 8911 |
| hs132669457 | TTATTCTAATTCCACTCCCTCGG | 8912 |
| hs132669919 | AACTCATTAGATATGCTAGAAGG | 8913 |
| hs132669669 | ATAGATGATAACGTGACATTCGG | 8914 |
| hs132669335 | CTGTAAGTGGAGGTGAAGTCAGG | 8915 |
| hs132669810 | ATTATTTCCTGCCTAAGCCTTGG | 8916 |
| hs132669525 | TTATTCAAACTATCACAGATAGG | 8917 |
| hs132669660 | ATAGTTTTGATATTTCTGATTGG | 8918 |
| hs132669796 | CTATTATTCAAGTTGCATCTAGG | 8919 |
| hs132669237 | TTATCCCATGTCCCTGATGCTGG | 8920 |
| hs132669941 | AGTGACATTTTAATGTTTGGAGG | 8921 |
| hs132669353 | TCAGAATCCTTTCCAACAATGGG | 8922 |
| hs132669534 | CCTCACAAGTGGCAAATACCTGG | 8923 |
| hs132669484 | ATTGCTAGATTGCTAAACTTAGG | 8924 |
| hs132669836 | CAAAAGCTATACCAGCTAGAAGG | 8925 |
| hs132669829 | GTTCAGCAAAGCTTACATAATGG | 8926 |
| hs132669455 | AATTAGAATAAAGTAGTATAGGG | 8927 |
| hs132669657 | GATATATTCATATTTGTCCTTGG | 8928 |
| hs132669472 | CAGAAACTCTGTTAGAATGTAGG | 8929 |
| hs132669691 | ATTCGTTGCAGTAAATACTTTGG | 8930 |
| hs132669753 | TCTCCAGTCACAAATGAGTTTGG | 8931 |
| hs132669723 | ACAATTATCAGAAAAGTTGATGG | 8932 |
| hs132669889 | ATCTTAATATCGATAATAGATGG | 8933 |
| hs132669585 | TCTCATGCTAACTTTCTGAATGG | 8934 |
| hs132669815 | TTTCTCTCTCTACCTAAGACAGG | 8935 |
| hs132669804 | TAGAAATTATAGCATAGCTTTGG | 8936 |
| hs132669565 | TATGGTGTATCATTAAATATAGG | 8937 |
| hs132669650 | AATCAGGAAGATTGATTTGAGGG | 8938 |
| hs132669573 | TGATAAACGTTATAAATCTTGGG | 8939 |
| hs132669641 | ATATGGATGGAGGACAAAAATGG | 8940 |
| hs132669635 | CTTCATTTCTAGTTGTTGGATGG | 8941 |
| hs132669248 | CAGAAGATACTCGATCAATATGG | 8942 |
| hs132669786 | CCAGTTTGCCTAAGGAATAAGGG | 8943 |
| hs132669816 | AGATTACTAGTAAACAAAAATGG | 8944 |
| hs132669365 | CCTATAGGAAGGAAGGTTTAGGG | 8945 |
| hs132669687 | TGTGAAATAAAATCACAATTAGG | 8946 |
| hs132669250 | ATATGGAAACACTAATAATATGG | 8947 |
| hs132669391 | GTAAAGTGCAGGTGAATTATAGG | 8948 |
| hs132669820 | CATTCTCATGACCATGATAATGG | 8949 |
| hs132669370 | AATTGGATGCGAAGTATAATTGG | 8950 |
| hs132669200 | GCTTTCAAAGAGGTCATAATAGG | 8951 |
| hs132669830 | TTATCACATTAGAATTTAATAGG | 8952 |
| hs132669408 | CCAAAGATGGTTTAAATAAAGGG | 8953 |
| hs132669956 | TTAAGAAGACTAACAAGTTTTGG | 8954 |
| hs132669514 | AAAATTGTACTGATGAAAATTGG | 8955 |
| hs132669508 | ATACATTACCTCCTTTTATTAGG | 8956 |
| hs132669291 | AGTTTTTGCTTCCACTTAAATGG | 8957 |
| hs132669107 | GGAGTGTAAAGCGAAATCCAGGG | 8958 |
| hs132669142 | AGATCTTAGAGGACTCCTGGGGG | 8959 |
| hs132668681 | AGAAATACAATTATTCACAGAGG | 8960 |
| hs132668554 | TAAACACAGGAATAAATTAGGGG | 8961 |
| hs132668867 | TCTACAGTTTTGGCACACTGAGG | 8962 |
| hs132668978 | AAACCCTCATTATAGCACATGGG | 8963 |
| hs132668700 | ATACTTAGGAAATAAAGACATGG | 8964 |
| hs132668561 | TTATGGGATCTGGAGCACCCAGG | 8965 |
| hs132668974 | TGTACTATACTGAATGCTGGAGG | 8966 |
| hs132669081 | AATAAATAAATAATGCCTGGAGG | 8967 |
| hs132669141 | TAGATCTTAGAGGACTCCTGGGG | 8968 |
| hs132669030 | AAGCAATTGATCCTATATGGTGG | 8969 |
| hs132668775 | ACTCCTAAGCTACCAAATGGGGG | 8970 |
| hs132668550 | TATTTTGTAATGATGAACAGGGG | 8971 |
| hs132668718 | TGGGTATTCAATGAAGTCGGAGG | 8972 |
| hs132668551 | TGATGAACAGGGGTAAACACAGG | 8973 |
| hs132668663 | TCATAGATGAATTTATACAACGG | 8974 |
| hs132668981 | TATAGAGTATATATTCACATCGG | 8975 |
| hs132668653 | AATAAAGGCCTTGATCATTGGGG | 8976 |
| hs132669006 | TGTGATATATTTTTTCACAGGGG | 8977 |
| hs132668980 | TAGGTGACTGAGTTTCTAAGAGG | 8978 |
| hs132668906 | TAACAAGCATCATATTCCAAGGG | 8979 |
| hs132668971 | GGATTTAAGCCTGATCATGGAGG | 8980 |
| hs132668996 | GTGGCATGATGCTATTGAGGAGG | 8981 |
| hs132668543 | TGACAGCCTCACTTAATAGGGGG | 8982 |
| hs132669036 | TGTTGAAATGAAGATAGCAAAGG | 8983 |
| hs132668896 | GAAGACACTGACCTCTCCAATGG | 8984 |
| hs132669011 | CCCAAGAGTGAGTCTTTCTGGGG | 8985 |
| hs132668970 | GATTTAAGCCTGATCATGGAGGG | 8986 |
| hs132668633 | TGTACTCACCGTAAGTCCAGAGG | 8987 |
| hs132668924 | CATGGCTAACTTTCTGACAAGGG | 8988 |
| hs132668536 | AGGGTTCAGTTGAGACCAAGTGG | 8989 |
| hs132669121 | TAACTTCCAGTGTAGGCCAAGGG | 8990 |
| hs132668807 | TCTGTGATAACCATCAGATGAGG | 8991 |
| hs132669127 | AATGTGCCACATCGGAAAAGCGG | 8992 |
| hs132668916 | ACACCAGAGATAACATCACCAGG | 8993 |
| hs132669186 | ACACAGTAACACAGATGACATGG | 8994 |
| hs132668819 | CTATATGCAGAATGTATGGGTGG | 8995 |
| hs132669177 | TTGTGGATGAGAACAACGCAGGG | 8996 |
| hs132669128 | GCCACATCGGAAAAGCGGTACGG | 8997 |
| hs132668632 | GTACTCACCGTAAGTCCAGAGGG | 8998 |
| hs132669017 | CAATGTCTATGAAGGATGAGTGG | 8999 |
| hs132669166 | AAAAATGCTTTCTGGCAGCGAGG | 9000 |
| hs132669178 | TTTGTGGATGAGAACAACGCAGG | 9001 |
| hs132668804 | GTTCAAACTACCTCATCTGATGG | 9002 |
| hs132668568 | CAATAATAAATAGTGTAACAGGG | 9003 |
| hs132669159 | AGGCTCCTGCTCAATTCATGAGG | 9004 |
| hs132669053 | AGTTTGGTGATGCAGCAGATGGG | 9005 |
| hs132669110 | TTCTGATGTTCAGTGTTACGTGG | 9006 |
| hs132668549 | TTATTTTGTAATGATGAACAGGG | 9007 |
| hs132668542 | TCATTTCCCCCTATTAAGTGAGG | 9008 |
| hs132668724 | GCTGTTCATCATGAATTGGAAGG | 9009 |
| hs132669020 | TCCTTCATAGACATTGCTGTAGG | 9010 |
| hs132668528 | GTTTTCCCCAAACCCCCACATGG | 9011 |
| hs132668977 | GCACCCATGTGCTATAATGAGGG | 9012 |
| hs132668859 | CAGTGCTTAGATTTGGTAGGTGG | 9013 |
| hs132668808 | GCATGGGCAGACATATGTCATGG | 9014 |
| hs132668998 | AAGGATTTCCCTCGAAGGAGTGG | 9015 |
| hs132669126 | GAGAAGCAAATGTGCCACATCGG | 9016 |
| hs132668984 | TGTGCATAGATGCATAACCTTGG | 9017 |
| hs132669101 | AGCTAAGTACGGATAACCTAGGG | 9018 |
| hs132668582 | TATTCAAACTCTATGGCAGGTGG | 9019 |
| hs132668557 | AGGAGGCTGCTCTAGAACCAAGG | 9020 |
| hs132668894 | GAGGTCAGTGTCTTCTCATGAGG | 9021 |
| hs132669144 | CTGGGGGTCAATAATAGTAAGGG | 9022 |
| hs132669145 | GGGTCAATAATAGTAAGGGCTGG | 9023 |
| hs132669114 | ACGTAACACTGAACATCAGAAGG | 9024 |
| hs132668719 | TGTTGGGTATTCAATGAAGTCGG | 9025 |
| hs132668530 | TAATCTTTGTGCAATCAGGAAGG | 9026 |
| hs132668760 | CATATCATTCAGGCCAGCAAGGG | 9027 |
| hs132668938 | ACTCACTCTCATATTTAGCAAGG | 9028 |
| hs132669079 | AAGGGCATAAAGAGGCCAGAAGG | 9029 |
| hs132668744 | GGATTTCTTGGGAAATGATGGGG | 9030 |
| hs132668715 | CCATAGCTGAGTCTATGCTATGG | 9031 |
| hs132668941 | GACAGTGCCATAGGATCAAGTGG | 9032 |
| hs132668757 | TAGAGCCTAGCCCAGTGTAGAGG | 9033 |
| hs132669102 | TAGCTAAGTACGGATAACCTAGG | 9034 |
| hs132668576 | GCACGTTTGCCAGAAAGTAACGG | 9035 |
| hs132669120 | GTAACTTCCAGTGTAGGCCAAGG | 9036 |
| hs132669008 | TTTTTTCACAGGGGAATGAGAGG | 9037 |
| hs132668544 | GTGACAGCCTCACTTAATAGGGG | 9038 |
| hs132668587 | TGGAAGGGAACTTATTAGGATGG | 9039 |
| hs132668805 | TTATCACAGAAAAATTTGCATGG | 9040 |
| hs132668982 | CTATATTCTGACTTCAGTGAAGG | 9041 |
| hs132668710 | GGGTATCCTGTAAATTCGATGGG | 9042 |
| hs132668829 | TTATTGGGAGAGAGTTGGGGTGG | 9043 |
| hs132668995 | GCATCATGCCACTCCTTCGAGGG | 9044 |
| hs132668593 | TATAAGCTCTGGAATGTCAAAGG | 9045 |
| hs132668930 | TTAATGGTTATGATGGTAAGGGG | 9046 |
| hs132668781 | AATGCTTCTCAATAGCCTGAAGG | 9047 |
| hs132668674 | AATGGTAATGAAATTTAACTAGG | 9048 |
| hs132668961 | AGAGCAGAGAAACAGGAGGCCGG | 9049 |
| hs132668621 | ATTCTTGCCATATTGATCAAGGG | 9050 |
| hs132669104 | AATGTTAGCATAGCTAAGTACGG | 9051 |
| hs132668713 | CCATAGCATAGACTCAGCTATGG | 9052 |
| hs132668806 | TATCACAGAAAAATTTGCATGGG | 9053 |
| hs132668725 | GCGTTCTGTGTTGTTTCTAGGGG | 9054 |
| hs132668642 | TAGCTGTAAGACAAAAGCTATGG | 9055 |
| hs132668832 | TGATTATCCTCCTGCTCAGACGG | 9056 |
| hs132668875 | GTTATGAACAGAATTTCTAGTGG | 9057 |
| hs132668787 | CTACATATGGAAAAGGACATAGG | 9058 |
| hs132668617 | AAATCAGAACAACTAAGTAATGG | 9059 |
| hs132668794 | AGTCAGAATGTATTAGATGAGGG | 9060 |
| hs132668816 | GCATGGATTGTAGAAAGAGTAGG | 9061 |
| hs132668539 | GCCTTTCTAACTTACAAATGTGG | 9062 |
| hs132668862 | AATCTCAGTGTAAGAATGCAAGG | 9063 |
| hs132669044 | TTAAATTCTGCTCAGATCAGAGG | 9064 |
| hs132668815 | GATTGTAGAAAGAGTAGGAAAGG | 9065 |
| hs132668571 | TTTGTTACATAACACAAGAGTGG | 9066 |
| hs132668590 | TATAGTGTTCTAAAATGTTGAGG | 9067 |
| hs132668523 | GTCATAGCAGAAAATTGGCTTGG | 9068 |
| hs132668893 | TCCTTTAAACACCATTGGAGAGG | 9069 |
| hs132668878 | TCAACCTTATATTTTAACACGGG | 9070 |
| hs132668736 | TTAATTCAAGACATCTGGACAGG | 9071 |
| hs132668637 | GCAAATCTACTCCAGCACTCTGG | 9072 |
| hs132668748 | CCTTCTACCACCTCTACACTGGG | 9073 |
| hs132669097 | ACTTCCTTCATAGCTGCCCTAGG | 9074 |
| hs132668836 | ATATAGGCTTATGATAAGAATGG | 9075 |
| hs132668844 | AAACATAGAGTAAGCAGTAGTGG | 9076 |
| hs132668907 | TTAACAAGCATCATATTCCAAGG | 9077 |
| hs132668594 | ATAAAACTCTTTTTGCCATGAGG | 9078 |
| hs132668527 | AATGTTAAGAAAGGTACAGCAGG | 9079 |
| hs132668864 | ATAAATAGTGATGCTCAAAAGGG | 9080 |
| hs132668707 | ATAGAAAACAAAAACAAGGATGG | 9081 |
| hs132668750 | GTAGAAGGAATGGGGCATAGAGG | 9082 |
| hs132668630 | GTACAAGGAAATAAAGGAGTGGG | 9083 |
| hs132669119 | CTGCATGTAACTTCCAGTGTAGG | 9084 |
| hs132668589 | GCTTCGAAAATAAGAAGCCTAGG | 9085 |
| hs132668703 | CATGGAATTATGTAAGGCTAGGG | 9086 |
| hs132668902 | GTAAAATAAGAATATGGGCATGG | 9087 |
| hs132668613 | AAGAAGTGTAAGAAAAACATTGG | 9088 |
| hs132669056 | AGATGGGAGTTGCTTTTGTGGGG | 9089 |
| hs132669163 | TTTCTTATCCAAAATTATGAGGG | 9090 |
| hs132668934 | CTTTCATTAAGCACTTATGAGGG | 9091 |
| hs132668858 | GTACAGTGCTTAGATTTGGTAGG | 9092 |
| hs132668676 | TGACATTTGACAACAAACATTGG | 9093 |
| hs132668697 | ACACATGTAAAATAATACTTAGG | 9094 |
| hs132668625 | AATCTAACACAAGAACCCTCTGG | 9095 |
| hs132668534 | CTTGGTCTCAACTGAACCCTAGG | 9096 |
| hs132668721 | AGTACCGGCAATTAGCTGTTGGG | 9097 |
| hs132668782 | ATGCTTCTCAATAGCCTGAAGGG | 9098 |
| hs132668991 | TTACTATTAATGAAAGCTCAAGG | 9099 |
| hs132669019 | GATGAGTGGTTTCTCCCAAATGG | 9100 |
| hs132669000 | TGATGTTGACAAAGAATGAAAGG | 9101 |
| hs132668801 | TACACTACATTAATAAAAGTAGG | 9102 |
| hs132668776 | CCATTTGGTAGCTTAGGAGTTGG | 9103 |
| hs132668931 | TTTAATGGTTATGATGGTAAGGG | 9104 |
| hs132668679 | TTAATGTTACATCTCACTGTTGG | 9105 |
| hs132669041 | CTCTCTCTCTCTCAACTGGAGGG | 9106 |
| hs132668796 | CTAATAGACATCATAAGTGCAGG | 9107 |
| hs132669133 | TTTCCTGATGGCATAGCAGACGG | 9108 |
| hs132668797 | ACTTATGATGTCTATTAGAAAGG | 9109 |
| hs132668770 | GAATATCAAAAGCTTTTCTAGGG | 9110 |
| hs132668526 | GAGAAGACAAATGTTAAGAAAGG | 9111 |
| hs132669042 | GCTCTCTCTCTCTCAACTGGAGG | 9112 |
| hs132668960 | AGGCCGGAAAACATGTTAAGAGG | 9113 |
| hs132669140 | CTAGATCTTAGAGGACTCCTGGG | 9114 |
| hs132668646 | TATGAACTATGCAACGTTCAGGG | 9115 |
| hs132669052 | AAGTTTGGTGATGCAGCAGATGG | 9116 |
| hs132668936 | CACTTATGAGGGCAAAAGACAGG | 9117 |
| hs132668942 | GTTAAGTTTGACAGTGCCATAGG | 9118 |
| hs132669039 | GCTTCTGTATATTCTGTGACAGG | 9119 |
| hs132668840 | AGAGGAAAAAGAGACTATAAGGG | 9120 |
| hs132668846 | ATCTAGACATTCCCAATCCTGGG | 9121 |
| hs132668842 | TTAAAGAACTACAGGAGTAATGG | 9122 |
| hs132669010 | CCCCAGAAAGACTCACTCTTGGG | 9123 |
| hs132668810 | GACAGTCCCTAATCACGAAATGG | 9124 |
| hs132668615 | TAAGAGTTGGATTCATTCCATGG | 9125 |
| hs132669082 | TTTATTTAAAGGGCATAAAGAGG | 9126 |
| hs132668573 | AAGAGTGGAGAAACAAGTTTGGG | 9127 |
| hs132669183 | TCATCTGTGTTACTGTGTATAGG | 9128 |
| hs132668913 | CTATTAAGATATTTGCATATGGG | 9129 |
| hs132668567 | ATAAATAGTGTAACAGGGTAAGG | 9130 |
| hs132668874 | TCATAACAGAAATATTAAACAGG | 9131 |
| hs132669073 | GTGCTCAAATAGTTAAAAGTAGG | 9132 |
| hs132668788 | CTATGTCCTTTTCCATATGTAGG | 9133 |
| hs132668717 | AATACCCAACAGCTAATTGCCGG | 9134 |
| hs132668813 | AGGAAAGGCAAGAGAATTGAGGG | 9135 |
| hs132668752 | GTAGAGGTGGTAGAAGGAATGGG | 9136 |
| hs132668854 | GCTCTAGTCTCTAGGATCTCAGG | 9137 |
| hs132668779 | AGTCTTTCAGAACCCCCATTTGG | 9138 |
| hs132669181 | TTAAAAAATACAGCATAGCTAGG | 9139 |
| hs132668609 | GTGGCCAGTGTATCATAAGTTGG | 9140 |
| hs132668517 | TGAAATGATTTGCTCTCAAATGG | 9141 |
| hs132669025 | GTAACCAAGAAAAGTTCAATTGG | 9142 |
| hs132668914 | GGGAATGCAACAGAGATAGAAGG | 9143 |
| hs132669029 | CTTTACCTTACCTAATTGCCAGG | 9144 |
| hs132668668 | CATTTTTGTGTACTTCTCTAGGG | 9145 |
| hs132668772 | CCAACTCCTAAGCTACCAAATGG | 9146 |
| hs132669080 | TTAAATAAATAAATAATGCCTGG | 9147 |
| hs132669174 | CCTGGAAGACAGACTTCATAGGG | 9148 |
| hs132668714 | GACTCAGCTATGGAAAGAACAGG | 9149 |
| hs132669131 | GAGCACCTGAAGAAGAAGTTAGG | 9150 |
| hs132668917 | TTACCTGGTGATGTTATCTCTGG | 9151 |
| hs132669089 | AATTTCATAGTCATTAGAAATGG | 9152 |
| hs132668985 | GTCTAAATCTCTCAAAAGAATGG | 9153 |
| hs132668616 | TTAAAAGACTCAATAAGAGTTGG | 9154 |
| hs132668921 | GATAATTTCAATTAAAACGTTGG | 9155 |
| hs132668847 | ATTGGGAATGTCTAGATAGAAGG | 9156 |
| hs132668821 | GTAACTATATGCAGAATGTATGG | 9157 |
| hs132669105 | TCTTTTGGAGCTCTTCTCCCTGG | 9158 |
| hs132668958 | TGACAACAAAAATTGTAAACAGG | 9159 |
| hs132668698 | TTTACATGTGTTCTAAGAAAGGG | 9160 |
| hs132669143 | CCTGGGGGTCAATAATAGTAAGG | 9161 |
| hs132668691 | GGCTCTTGTCCATGTCAAGTTGG | 9162 |
| hs132668892 | TTTTTTCCTTTAAACACCATTGG | 9163 |
| hs132668891 | AACTCAGTAAATTAGAAATAGGG | 9164 |
| hs132668843 | CCTGTAGTTCTTTAAAATAGAGG | 9165 |
| hs132668565 | GTAACAGGGTAAGGTCTTATGGG | 9166 |
| hs132668908 | ATTATTTTGACATAAATGATTGG | 9167 |
| hs132668612 | TTACATGTAAAAATGAAAACTGG | 9168 |
| hs132668946 | GGGCAATTGGGACTTGAGATTGG | 9169 |
| hs132668537 | ATTATTCTGGTTTTATCCTAGGG | 9170 |
| hs132668519 | GTTTTAGGTTAATAAAAAATGGG | 9171 |
| hs132668920 | ATAATTTCAATTAAAACGTTGGG | 9172 |
| hs132668973 | TACAAGACATCGTAAATGATTGG | 9173 |
| hs132669116 | ACTTCAACTTCCAAAAGTATTGG | 9174 |
| hs132668592 | TGGAATGTCAAAGGCATGATAGG | 9175 |
| hs132668754 | CCCAGTGTAGAGGTGGTAGAAGG | 9176 |
| hs132668624 | CATCTCACAACTCTCTTTAGTGG | 9177 |
| hs132668940 | GGATCAAGTGGTGCTTTTAGTGG | 9178 |
| hs132668580 | TCTTAGGTATTCAAACTCTATGG | 9179 |
| hs132668591 | TGACATTCCAGAGCTTATAATGG | 9180 |
| hs132668857 | GCTTGTACAGTGCTTAGATTTGG | 9181 |
| hs132668541 | GCCACATTTGTAAGTTAGAAAGG | 9182 |
| hs132668545 | TGTGACAGCCTCACTTAATAGGG | 9183 |
| hs132668898 | TCAAGACTCTGTCATCTTAGAGG | 9184 |
| hs132668643 | CATTTGAAGTCTGAGAAAATAGG | 9185 |
| hs132668784 | GTATTTATTGAGTCCCCTTCAGG | 9186 |
| hs132668683 | TAAATAAGTCTCTAGTTAAAGGG | 9187 |
| hs132668871 | GGTAGTACTCTCTTATTCATTGG | 9188 |
| hs132668553 | GTAAACACAGGAATAAATTAGGG | 9189 |
| hs132668623 | ATATAAACCCTTGATCAATATGG | 9190 |
| hs132668905 | CTTGTTAATAGAATTCTTATGGG | 9191 |
| hs132668524 | TGAGCGTCATAGCAGAAAATTGG | 9192 |
| hs132668654 | TTATTCATGGATTCCTAGTTTGG | 9193 |
| hs132669137 | TCTTAAATGCTAGATCTTAGAGG | 9194 |
| hs132668766 | TTTCCATGAAGATCTATTTACGG | 9195 |
| hs132668945 | AGATTGGTAATTAAGAAAATAGG | 9196 |
| hs132668965 | GTTTAATTTCTCATGAATAATGG | 9197 |
| hs132668711 | GCTTCTCCCATCGAATTTACAGG | 9198 |
| hs132669118 | TTAAATGTGTCCAATACTTTTGG | 9199 |
| hs132668664 | TATACAACGGAGATTTATATTGG | 9200 |
| hs132668803 | TTAATGTAGTGTAAATAAATTGG | 9201 |
| hs132668596 | TTTTGCCATGAGGCCAAAAATGG | 9202 |
| hs132668937 | AGTGCTTAATGAAAGTTTAATGG | 9203 |
| hs132668574 | GGACATTTCCCGTTACTTTCTGG | 9204 |
| hs132668096 | GTATAACATATGGTACAGGGCGG | 9205 |
| hs132668025 | CCATGCTCAGATCCACAACGGGG | 9206 |
| hs132668325 | AGATGTATTGAAGGTCTGTGTGG | 9207 |
| hs132668193 | CCCACCATACAAAATTACAGGGG | 9208 |
| hs132668355 | GGAATGCTTAGAAAGAGATGTGG | 9209 |
| hs132668065 | CACACAATGCATCAGCAACGGGG | 9210 |
| hs132668294 | CAATAAACAGTATCACGCAGAGG | 9211 |
| hs132667922 | ATGTGTATTAACCCACCTAGAGG | 9212 |
| hs132668104 | TTTAGCTGTCACTTCCAAAGGGG | 9213 |
| hs132668151 | CAAGGAGCTCAGAGTCTGCGAGG | 9214 |
| hs132668243 | AGTCGTCTGTTTAAACCCGGTGG | 9215 |
| hs132668026 | TGCTCAGATCCACAACGGGGAGG | 9216 |
| hs132668225 | GTGTAACATGAGTATCACACAGG | 9217 |
| hs132668463 | GAAGGCAGTAGCCATTAAAGGGG | 9218 |
| hs132668395 | TCTGTTGAAATGCCATCCAGAGG | 9219 |
| hs132668274 | AGGTTTATAGCTATGTCCTGAGG | 9220 |
| hs132668505 | GATACAATAGTAACTAACTGCGG | 9221 |
| hs132668095 | ACTGTATAACATATGGTACAGGG | 9222 |
| hs132668058 | CAGGCGTATATCCACTAAGGCGG | 9223 |
| hs132668349 | AACGCAACAGATGATTCCTGAGG | 9224 |
| hs132668176 | GAGTTGGCATGAGACATAGAGGG | 9225 |
| hs132668043 | GAAAATCTGACAAGCCTGGGAGG | 9226 |
| hs132668036 | ATAGCAACTCAACCAAACAAAGG | 9227 |
| hs132668479 | CAGTCCGTAGAACTCACAGATGG | 9228 |
| hs132668401 | TGTGGTGATGAGGGATGCCAGGG | 9229 |
| hs132668289 | TTTACGTGCTGAAAATTCTGGGG | 9230 |
| hs132668031 | TGACATGTGAATTAAATGGGAGG | 9231 |
| hs132668069 | CGGGGCTTTATGAAAGAGGGAGG | 9232 |
| hs132668070 | CCCGTTGCTGATGCATTGTGTGG | 9233 |
| hs132668425 | CTAGAATTATAATATACCCAGGG | 9234 |
| hs132668385 | TGGTAAAGAGGTACAGATGGGGG | 9235 |
| hs132667934 | CAGTGATGCGAGATACCCACAGG | 9236 |
| hs132668340 | AATGGTAAATCAAGAGAGCGTGG | 9237 |
| hs132668023 | GTCCATGCTCAGATCCACAACGG | 9238 |
| hs132668116 | TTAATCTAATCTGCTTCACAAGG | 9239 |
| hs132668049 | CCTGGCTCCAGTAAATTCAAGGG | 9240 |
| hs132668362 | AATCTGCAGTAACATTGCTGAGG | 9241 |
| hs132668458 | AAGATTGAAGACAAAAGAGGAGG | 9242 |
| hs132667892 | ATGTACGCTAGAAGTTGGAAGGG | 9243 |
| hs132668157 | CTACTGTCGTTATCAATAGGTGG | 9244 |
| hs132668503 | AATAGTAACTAACTGCGGATGGG | 9245 |
| hs132668363 | ATCTGCAGTAACATTGCTGAGGG | 9246 |
| hs132668477 | ACTCACAGATGGTTGTATGGTGG | 9247 |
| hs132668082 | TCCATTATGAGGCAGAAATGTGG | 9248 |
| hs132667931 | TACACGCATGGGTAAACAGAAGG | 9249 |
| hs132668447 | TTGGGACTGAAGGAACTGATGGG | 9250 |
| hs132668068 | CAACGGGGCTTTATGAAAGAGGG | 9251 |
| hs132668163 | GTTCTAAGACAAAAGTTGGGTGG | 9252 |
| hs132668260 | ATTGTGATGGTGAAAAAGGAAGG | 9253 |
| hs132667989 | TGTTAAACAAGAGTATGTATGGG | 9254 |
| hs132668133 | ATCCCAATTGAACAGACTGGTGG | 9255 |
| hs132667944 | TTACCTGACATGCACTGACAGGG | 9256 |
| hs132668234 | TGAAGTTCTCTACAGAATGAGGG | 9257 |
| hs132668421 | TGTTTAATACTGGACTGAGAGGG | 9258 |
| hs132668177 | AGAGTTGGCATGAGACATAGAGG | 9259 |
| hs132667923 | TGTGTTAATATCCTCTAGGTGGG | 9260 |
| hs132668108 | ATAATGGTATTCATTCAGTAGGG | 9261 |
| hs132668090 | TGAGAACCAAGCCATACCCTTGG | 9262 |
| hs132668030 | TCATATTGTTGTACGTGCCAAGG | 9263 |
| hs132668143 | CAAGCTACCAAGGAATGCCTGGG | 9264 |
| hs132667936 | TAAGCTCGCACATTTCCTGTGGG | 9265 |
| hs132668451 | CAGCATTAAAAGGAATCAAGTGG | 9266 |
| hs132667894 | TTCCAACTTCTAGCGTACATAGG | 9267 |
| hs132668046 | ATACTTAAGATTTACCTCCCAGG | 9268 |
| hs132668012 | GTAAGAAATTGGATAAAATGGGG | 9269 |
| hs132667994 | ATGGCATCACAAAAATGTATGGG | 9270 |
| hs132668246 | CAAAGAGGTCGTAACATACAGGG | 9271 |
| hs132668086 | ACTGAATAGTGTTTAGCCAAGGG | 9272 |
| hs132668440 | TAAAGTATAGAACTCAAGCATGG | 9273 |
| hs132668161 | TCTAAGACAAAAGTTGGGTGGGG | 9274 |
| hs132668014 | GGTTTCTAATCCTAATACAGTGG | 9275 |
| hs132668063 | ACCACACAATGCATCAGCAACGG | 9276 |
| hs132667917 | CTATAAAGTGCATCATAATGAGG | 9277 |
| hs132668222 | GTTAAAATAACAAAGCCACTTGG | 9278 |
| hs132668485 | TTTTCAATATAATTCATCCAAGG | 9279 |
| hs132668336 | CTGTTTCTAATAAAGAAAGAAGG | 9280 |
| hs132668145 | GAGGAAACCTCAAGCTACCAAGG | 9281 |
| hs132668277 | TTCCATTAACCACTCCTACAGGG | 9282 |
| hs132668134 | GGTATCCCAATTGAACAGACTGG | 9283 |
| hs132668242 | CAGAGTCGTCTGTTTAAACCCGG | 9284 |
| hs132667897 | AAGAGACAAGCAATATGAAGTGG | 9285 |
| hs132668278 | TCCATTAACCACTCCTACAGGGG | 9286 |
| hs132668379 | CTTCCTTATTGGACTAAATGGGG | 9287 |
| hs132668480 | TAACCACACAAGCATCACCTTGG | 9288 |
| hs132668383 | ACCTCTTTACCAAAGACAGCTGG | 9289 |
| hs132668005 | TTTGAGTGATTCCAGAGCTGAGG | 9290 |
| hs132668017 | CATTATTGCTAAAAGCTCAAGGG | 9291 |
| hs132667961 | TAAGCTTGTAACCCCATAGGTGG | 9292 |
| hs132667937 | TTAAGCTCGCACATTTCCTGTGG | 9293 |
| hs132668402 | GATGAGGGATGCCAGGGCGAAGG | 9294 |
| hs132668059 | GCGGAAACAATTATGTGCCATGG | 9295 |
| hs132668433 | GGACGAGAAGATGGTACAGAAGG | 9296 |
| hs132668249 | AGCTTGTATGAATCAAATGCAGG | 9297 |
| hs132668487 | GGGTCAGCTAATGATGAAATGGG | 9298 |
| hs132668432 | CGAGAAGATGGTACAGAAGGAGG | 9299 |
| hs132668312 | GGATCAGATTATTAAACATGAGG | 9300 |
| hs132668387 | TTTGGTAAAGAGGTACAGATGGG | 9301 |
| hs132668048 | CCTTGAATTTACTGGAGCCAGGG | 9302 |
| hs132668194 | ACCCACCATACAAAATTACAGGG | 9303 |
| hs132668111 | GCATCTGGATATCTCACTGTAGG | 9304 |
| hs132668403 | TGCCAGGGCGAAGGAAGAGAAGG | 9305 |
| hs132668253 | ACAAGTCTATAGAGACTGGTAGG | 9306 |
| hs132668155 | GTGCAAGACATTAACCTCAAAGG | 9307 |
| hs132668076 | AGAAATAAGGGATTTTCAGAGGG | 9308 |
| hs132668004 | TTGAGTGATTCCAGAGCTGAGGG | 9309 |
| hs132668450 | TCAAAGAAAAGTTATAGCAAGGG | 9310 |
| hs132668374 | ATTTTTAGAGTTCTAACTCAGGG | 9311 |
| hs132668367 | GTTTGAAGAAAACCAAAGACAGG | 9312 |
| hs132668087 | ATAGTGTTTAGCCAAGGGTATGG | 9313 |
| hs132668287 | ACGTAAATCAGATACTAGAAAGG | 9314 |
| hs132668131 | GATACCAGAAAATAAAGAGCAGG | 9315 |
| hs132668172 | CTTTACAATTTTAAACAACAGGG | 9316 |
| hs132668301 | AATTGGCTGATCCAATGGAATGG | 9317 |
| hs132668109 | GTTGTGTAGCACAAATTAGAAGG | 9318 |
| hs132668292 | CTTTCTCTATGAGTGTTCGTGGG | 9319 |
| hs132667927 | CCTAGTCACTTAGAAATAGGTGG | 9320 |
| hs132667891 | TATGTACGCTAGAAGTTGGAAGG | 9321 |
| hs132667930 | TTAAAAAAAAATACACGCATGGG | 9322 |
| hs132668164 | ATGGTTCTAAGACAAAAGTTGGG | 9323 |
| hs132668347 | CTAAGATCTAAATCATACATTGG | 9324 |
| hs132668015 | TTTTTTTTTCTCTAGAGAAGAGG | 9325 |
| hs132668055 | CTCTTAACGCCAATACTGATGGG | 9326 |
| hs132668067 | GCAACGGGGCTTTATGAAAGAGG | 9327 |
| hs132668346 | AGATCTAAATCATACATTGGAGG | 9328 |
| hs132668223 | AGTATCACACAGGTTACAAAGGG | 9329 |
| hs132668439 | ACTATTGGCTGGAATTGTCGTGG | 9330 |
| hs132668204 | TATGTACTAATGCAATTGAGTGG | 9331 |
| hs132668085 | TACTGAATAGTGTTTAGCCAAGG | 9332 |
| hs132667883 | CCAGGTATTGGGAGATCGATGGG | 9333 |
| hs132667960 | TTTTAAGCTTGTAACCCCATAGG | 9334 |
| hs132668268 | GAATTAGTTTGAGATACAAAGGG | 9335 |
| hs132668105 | AAAATTCCTTGAGTTCAGACAGG | 9336 |
| hs132668028 | CCCCGTTGTGGATCTGAGCATGG | 9337 |
| hs132668475 | ACAACCATCTGTGAGTTCTACGG | 9338 |
| hs132668267 | TTACATTTATATCTATAGATGGG | 9339 |
| hs132667915 | TTGTGATGCTTTCTATGCAAAGG | 9340 |
| hs132668060 | GCCTTAGTGGATATACGCCTGGG | 9341 |
| hs132667911 | ATTTTCTTCTACAATCCAAATGG | 9342 |
| hs132668455 | GACACTACAGAGCTATATAGAGG | 9343 |
| hs132668411 | ACTCAGAGAAGGATCTTAGCAGG | 9344 |
| hs132668146 | GGTATAAAACGATAAGGAAGAGG | 9345 |
| hs132667975 | AAATTCTGAGATGTACTAATGGG | 9346 |
| hs132667910 | TCTTCTACAATCCAAATGGTAGG | 9347 |
| hs132668457 | AAGAAGATTGAAGACAAAAGAGG | 9348 |
| hs132668002 | AAGACTATATCCCTCAGCTCTGG | 9349 |
| hs132668042 | GAGGAAAATCTGACAAGCCTGGG | 9350 |
| hs132668264 | TTAAAAAATAACTAATCATAGGG | 9351 |
| hs132668192 | GGAAATATAAGCAAGTATGCTGG | 9352 |
| hs132668269 | TGAATTAGTTTGAGATACAAAGG | 9353 |
| hs132668103 | TTTTAGCTGTCACTTCCAAAGGG | 9354 |
| hs132668390 | GCCAGCTGTCTTTGGTAAAGAGG | 9355 |
| hs132668321 | TTATATGGCAGAAATTCTCCTGG | 9356 |
| hs132668281 | TGTGTAAAGTGTGCCCCTGTAGG | 9357 |
| hs132668166 | ATTGAAAGATCCAAAAAAGATGG | 9358 |
| hs132668492 | GGGAAGCAGGGGTTGAAGGGAGG | 9359 |
| hs132668088 | GTTTAGCCAAGGGTATGGCTTGG | 9360 |
| hs132668179 | TTAGAATTTGTGATTTCTTGTGG | 9361 |
| hs132667952 | TAGATCTGCATCATCACGTCAGG | 9362 |
| hs132668247 | ACCTCTTTGCACATACCACCGGG | 9363 |
| hs132668427 | CTGGGTATATTATAATTCTAGGG | 9364 |
| hs132668142 | CCTGGGAATGTGATGAATGCTGG | 9365 |
| hs132668399 | TGAAGGAATTGTGGTGATGAGGG | 9366 |
| hs132668434 | AGAAGAAGAGGACGAGAAGATGG | 9367 |
| hs132668150 | GACTCTGAGCTCCTTGAGGTGGG | 9368 |
| hs132668149 | CTGCGAGGTATAAAACGATAAGG | 9369 |
| hs132668368 | TTTTCCAAAGAAGACTCTAAAGG | 9370 |
| hs132667957 | TCTTCTTCACTGGAGTTGATGGG | 9371 |
| hs132668202 | CTAATGCAATCGAGTGTGACAGG | 9372 |
| hs132668405 | AGGAAGAGAAGGCGTGAGATGGG | 9373 |
| hs132668391 | ATCCTTTTTGAGCCTCTGGATGG | 9374 |
| hs132668493 | GCTGGGAAGCAGGGGTTGAAGGG | 9375 |
| hs132667987 | TTTGCAATTCTTTAACGGGTTGG | 9376 |
| hs132668304 | CAATTTGTAGAAATACTTTGTGG | 9377 |
| hs132668258 | TATCAGAAGCAGACAGAAGTTGG | 9378 |
| hs132668446 | TTTGGGACTGAAGGAACTGATGG | 9379 |
| hs132668282 | GCCCCAGCTAAATCCTCAAATGG | 9380 |
| hs132667935 | GCATCACTGTTTGAGCGCTATGG | 9381 |
| hs132668300 | AATGGAATGGAATGAATTTGAGG | 9382 |
| hs132668137 | CCAGCATTCATCACATTCCCAGG | 9383 |
| hs132668141 | AGGCATTCCTTGGTAGCTTGAGG | 9384 |
| hs132668474 | AAACAAATACAGAAGAGTATAGG | 9385 |
| hs132667908 | TTTCAATTAAGAGTCTTTTGAGG | 9386 |
| hs132668497 | TTAAATAAGGCTGGGAAGCAGGG | 9387 |
| hs132668314 | TATTTTCAAGAAGGAAAACCTGG | 9388 |
| hs132668273 | TAAACCTTCTAAGTTAATATGGG | 9389 |
| hs132668348 | GCTTAAAGAAAACTTTCCTCAGG | 9390 |
| hs132668394 | TCAACAGAATTTTAGTGCAATGG | 9391 |
| hs132668305 | AATGTCATCTGATATAAAGTTGG | 9392 |
| hs132668024 | TCCATGCTCAGATCCACAACGGG | 9393 |
| hs132668352 | AATGAGCAAATGTTAAAGAATGG | 9394 |
| hs132668215 | AATAGAAGTTATTTATGAAGAGG | 9395 |
| hs132668317 | ATAAAAATAATTATAAAGAATGG | 9396 |
| hs132668489 | GCAGACATTTTTCTAAGGCATGG | 9397 |
| hs132668453 | ATCTAGACTAGTATCTAAAAGGG | 9398 |
| hs132668462 | GGAAGGCAGTAGCCATTAAAGGG | 9399 |
| hs132668315 | CAAGTATTCTATTTTCAAGAAGG | 9400 |
| hs132668007 | ATAGCCATTCAGGCAATGATAGG | 9401 |
| hs132668074 | TAGCAGAGAAGTGTATTATAGGG | 9402 |
| hs132668032 | ATATGACATGTGAATTAAATGGG | 9403 |
| hs132667890 | CTCCTATGTACGCTAGAAGTTGG | 9404 |
| hs132668044 | TGGGAGGTAAATCTTAAGTATGG | 9405 |
| hs132668437 | ATCTCTGTTTCAAAGTCAAATGG | 9406 |
| hs132667949 | GCATCATCACGTCAGGTAGATGG | 9407 |
| hs132667966 | AATTATACATTTCCACCTATGGG | 9408 |
| hs132667995 | TATGGCATCACAAAAATGTATGG | 9409 |
| hs132667980 | GATATAAAGAACACTTTAAGTGG | 9410 |
| hs132668372 | TACATGCAGATATATCCTATTGG | 9411 |
| hs132668173 | CAACAGGGCCATATTCCAATAGG | 9412 |
| hs132668110 | ATCCAGATGCCGAATCCCTTTGG | 9413 |
| hs132668471 | CAAAGACATCTACTAAATATCGG | 9414 |
| hs132668276 | ATTCCATTAACCACTCCTACAGG | 9415 |
| hs132668375 | ACTCTAAAAATACTTCCAATAGG | 9416 |
| hs132668328 | GAATAACATACCTAAAAATAGGG | 9417 |
| hs132668406 | CGCCTTCTCTTCCTTCGCCCTGG | 9418 |
| hs132668190 | TCCCCTGTAATTTTGTATGGTGG | 9419 |
| hs132667904 | GTAAAAGGTGTATTTTCCTTAGG | 9420 |
| hs132668369 | TTTAGAGTCTTCTTTGGAAAAGG | 9421 |
| hs132668156 | CTACTACTGTCGTTATCAATAGG | 9422 |
| hs132668279 | GCCCCTGTAGGAGTGGTTAATGG | 9423 |
| hs132668358 | GCGTAGAGAGTCTGTTTCATAGG | 9424 |
| hs132667981 | TTATGATTCAGCTAATATCTAGG | 9425 |
| hs132668165 | GATGGTTCTAAGACAAAAGTTGG | 9426 |
| hs132668407 | GATGGGCACTCAACACTAATAGG | 9427 |
| hs132668270 | GTTTTCTGACTTAAAACAATAGG | 9428 |
| hs132668393 | TGCCATCCAGAGGCTCAAAAAGG | 9429 |
| hs132667909 | AATGAGAATTGCCTACCATTTGG | 9430 |
| hs132668378 | TCTTCCTTATTGGACTAAATGGG | 9431 |
| hs132668189 | ATTTCCCCTGTAATTTTGTATGG | 9432 |
| hs132667939 | ACTGCTTCGTAATAATTAGATGG | 9433 |
| hs132668235 | ATGCTTCTACTAGATAAGATTGG | 9434 |
| hs132668241 | ATATCCAACCGTCTGTTCATAGG | 9435 |
| hs132668020 | TGTGAGACTTTGTAATTCATTGG | 9436 |
| hs132668019 | AATTACAAAGTCTCACAAAATGG | 9437 |
| hs132667943 | TAAAATGGCACGTAACAAAATGG | 9438 |
| hs132668170 | ACACAGTGAAACATTTTAGAAGG | 9439 |
| hs132667941 | TCAGTGCATGTCAGGTAAAATGG | 9440 |
| hs132668239 | AAGATTTTTTTGACTTAAAAGGG | 9441 |
| hs132667928 | TCTCCTAGTCACTTAGAAATAGG | 9442 |
| hs132668364 | GAGAGAAAGAATCTAATTATCGG | 9443 |
| hs132667979 | TGTTCTTTATATCCAAATAATGG | 9444 |
| hs132668084 | GCCACATTTCTGCCTCATAATGG | 9445 |
| hs132668016 | CTGAGTTTCTATTTACGTATAGG | 9446 |
| hs132668091 | TGAAGCACCATACTATAAAATGG | 9447 |
| hs132667899 | TATTATACCACTATATAAAATGG | 9448 |
| hs132668237 | GTGGAGTGCAAGAAAATAAAAGG | 9449 |
| hs132667903 | TTGCAGTGAGAACAAGTAAAAGG | 9450 |
| hs132667999 | AATATTGCTAAGCAATAAATAGG | 9451 |
| hs132668356 | TATATAGTCTTCAGTTTTAGAGG | 9452 |
| hs132668444 | ACTCAAGCATGGATTCTTTTGGG | 9453 |
| hs132668322 | GAGAATTTCTGCCATATAAAAGG | 9454 |
| hs132668125 | TCACTGCTGTTATTCTTTGCAGG | 9455 |
| hs132668361 | AGTCTTGTCCTTAACTTTAGAGG | 9456 |
| hs132667906 | AGTTAGACTTTTATTCTTTAGGG | 9457 |
| hs132668009 | GTTAGACAAGTGTAAGAAATTGG | 9458 |
| hs132668230 | TCACTGTTGGTCAAAATAATTGG | 9459 |
| hs132667870 | CTAGCTGTAAAAGACACGGGGGG | 9460 |
| hs132667871 | ACTAGCTGTAAAAGACACGGGGG | 9461 |
| hs132667872 | AACTAGCTGTAAAAGACACGGGG | 9462 |
| hs132667874 | GAAACTAGCTGTAAAAGACACGG | 9463 |
| hs132667867 | TGCAGTGCCTTTTTAGTGCATGG | 9464 |
| hs132667744 | GTAAATGTATTTCTGCTGTGGGG | 9465 |
| hs132667669 | AGAGCTCTAGAAAATTCAGGTGG | 9466 |
| hs132667700 | GCGTATTCCTGATGAGAGTGAGG | 9467 |
| hs132667816 | GGAAGATGTTTGATGGTACGAGG | 9468 |
| hs132667653 | CCCTCAGTTAATAATCCTGGGGG | 9469 |
| hs132667789 | AGAGCATTTTTATGGCCCTGAGG | 9470 |
| hs132667773 | TAGTGAAAACTGGTGACAGATGG | 9471 |
| hs132667734 | GCTGGGGAAGGACAGCTCTGGGG | 9472 |
| hs132667541 | TGAACCGAATGTTAAAACTGTGG | 9473 |
| hs132667804 | TCGAGATCAAGAAAAAACACAGG | 9474 |
| hs132667633 | TCATTTGTTTAGGTACCATGAGG | 9475 |
| hs132667762 | CAAGCAGGACACAATCCCATGGG | 9476 |
| hs132667680 | GGAATGTAGACCTACCTCCAAGG | 9477 |
| hs132667801 | ACACTAAGACATCCAGACTCAGG | 9478 |
| hs132667610 | GTGGGGGTTTAGCAATAGGTAGG | 9479 |
| hs132667649 | CCAGGATTATTAACTGAGGGAGG | 9480 |
| hs132667573 | TGTATTTGCTGCCAAATATGGGG | 9481 |
| hs132667770 | TAGTATCACTGATAACCCATGGG | 9482 |
| hs132667608 | AAATAAAACTCACGGTGTGGGGG | 9483 |
| hs132667844 | TCTCATTCTCAAAACACTCGAGG | 9484 |
| hs132667631 | AAAACCTATGAGTAACCTCATGG | 9485 |
| hs132667683 | GACCTACCTCCAAGGTAGGGAGG | 9486 |
| hs132667551 | AAGTTCCTGTGAGCTGTGGAGGG | 9487 |
| hs132667748 | AGAATCACGTAAATTATCGTGGG | 9488 |
| hs132667600 | ACTGAACTATAACATACTCCAGG | 9489 |
| hs132667790 | AGAAATCTTGGCTAGCCTCAGGG | 9490 |
| hs132667636 | TGGCTTAATAATAAAACAGGAGG | 9491 |
| hs132667555 | TGTAACCCTCCACAGCTCACAGG | 9492 |
| hs132667566 | CTGACTTAATCTGTAAACAAAGG | 9493 |
| hs132667654 | TCCCTCAGTTAATAATCCTGGGG | 9494 |
| hs132667839 | TTAAACTCATAGTATCAGACCGG | 9495 |
| hs132667704 | GTAACTACACATAATATAGGTGG | 9496 |
| hs132667648 | CCCCCAGGATTATTAACTGAGGG | 9497 |
| hs132667516 | AAAGATCACAGAATAAGCCTGGG | 9498 |
| hs132667675 | AGAGAATGTGTACAAGGCAAAGG | 9499 |
| hs132667861 | TGAAAGCTAGAAAGTACATACGG | 9500 |
| hs132667761 | GCAAGCAGGACACAATCCCATGG | 9501 |
| hs132667565 | GGGAGTAATGTTCAGTACCCAGG | 9502 |
| hs132667682 | GTAGACCTACCTCCAAGGTAGGG | 9503 |
| hs132667778 | TTCACTGCCTGAGTCAGCAAAGG | 9504 |
| hs132667529 | GAATTCCGTCAGGAATTAAGGGG | 9505 |
| hs132667771 | ATAGTATCACTGATAACCCATGG | 9506 |
| hs132667593 | TGAACTGCAGAATGCTCTAGTGG | 9507 |
| hs132667629 | ATTTGGAAACATGTCAGAAGAGG | 9508 |
| hs132667588 | CTAAGTAGCCCATTTTGGCATGG | 9509 |
| hs132667818 | TTTTTGTAATTCTTTTTGGTAGG | 9510 |
| hs132667568 | TTTGTTTACAGATTAAGTCAGGG | 9511 |
| hs132667538 | ATAATCACAGCATTTCAGAATGG | 9512 |
| hs132667514 | GTTTTAACAGGTTTTAAAAGCGG | 9513 |
| hs132667840 | TCATTTCTAGTAAAAGAGGCCGG | 9514 |
| hs132667724 | AGATATTCTCAAATGGCTGTGGG | 9515 |
| hs132667666 | ACATATCAATAATTAACCATAGG | 9516 |
| hs132667578 | TGTCATGACAATTTGCTCTGTGG | 9517 |
| hs132667622 | TCTGAGTAAGTAAGTCAAAGAGG | 9518 |
| hs132667852 | GCTGCTTAGAACTTTATGAAAGG | 9519 |
| hs132667646 | CCCAGTTCCAGAACTCCCCCAGG | 9520 |
| hs132667835 | TGGTACGTATTTAAAATGAGTGG | 9521 |
| hs132667589 | TTAGATTGTCCTTTTCAGGAAGG | 9522 |
| hs132667854 | AAGTGGGAAAAAACTATAGGTGG | 9523 |
| hs132667713 | AATTATTTGAGGGCCATCCCAGG | 9524 |
| hs132667527 | GATTTCCCCTTAATTCCTGACGG | 9525 |
| hs132667694 | TGTATCCTTACAAAAGGCCCAGG | 9526 |
| hs132667768 | TGTCCTGCTTGCCATTGAGGTGG | 9527 |
| hs132667536 | TGAGAAAATGAGAATGGCTAAGG | 9528 |
| hs132667546 | AGTAAAAGAACTAAGTCGCTGGG | 9529 |
| hs132667708 | ATCACCAGTTGTACTTTGGGAGG | 9530 |
| hs132667728 | TAAGGGCTACAGAAGTACTTAGG | 9531 |
| hs132667687 | GTACAGTCAATAAATCAGACTGG | 9532 |
| hs132667732 | AGGACAGCTCTGGGGAAGCAGGG | 9533 |
| hs132667723 | TCAAATGGCTGTGGGATCAAAGG | 9534 |
| hs132667572 | CCAAATATGGGGTTGTTAAGTGG | 9535 |
| hs132667559 | ATTCCTTTCAAATCAACCAAAGG | 9536 |
| hs132667719 | CTACCTTTACCTCAACTCCTGGG | 9537 |
| hs132667643 | ATGAGTATCAAAAATGATGATGG | 9538 |
| hs132667794 | AGTTGCAGTTATTTTTTCCAAGG | 9539 |
| hs132667518 | TGGTGTATGGAATGCAACCCAGG | 9540 |
| hs132667725 | AAGATATTCTCAAATGGCTGTGG | 9541 |
| hs132667759 | ATCCCCACCTCCCACCTCAATGG | 9542 |
| hs132667614 | TATGGCTCTCAGCTTGGGACAGG | 9543 |
| hs132667612 | TTGCATTAGTACTAGAACAAAGG | 9544 |
| hs132667533 | GTTTTCGTTTGAATTCCGTCAGG | 9545 |
| hs132667624 | GCCATATGTGTAAGGCTGAATGG | 9546 |
| hs132667743 | ATTTCTGCTGTGGGGACTGTTGG | 9547 |
| hs132667644 | ACTCATATCTAAAATTTACTAGG | 9548 |
| hs132667780 | CAAATTCTAGACCAGCTGTCAGG | 9549 |
| hs132667856 | CTACTTTTCTGAATTAAAGTGGG | 9550 |
| hs132667823 | AGTTTTGGCCTGCAGCTGATGGG | 9551 |
| hs132667717 | GTAAAGGTAGCAAGTCAAACAGG | 9552 |
| hs132667672 | TGAATTTTCTAGAGCTCTATGGG | 9553 |
| hs132667710 | TCAACCTCCCAAAGTACAACTGG | 9554 |
| hs132667522 | TCAAAAGTTCAGAAAAATAGAGG | 9555 |
| hs132667859 | ATAGTGATAATATACAGTACTGG | 9556 |
| hs132667795 | CCAAGGAATCAACTGATATGAGG | 9557 |
| hs132667689 | TACCTTCCTCCCTACCTTGGAGG | 9558 |
| hs132667558 | TTCCTTTCAAATCAACCAAAGGG | 9559 |
| hs132667596 | GTAAAAGACAAACTAATTGAAGG | 9560 |
| hs132667712 | TGTCTGAATTAATTATTTGAGGG | 9561 |
| hs132667632 | GGTACCATGAGGTTACTCATAGG | 9562 |
| hs132667830 | TTAAATTAAAAGACCAATGAGGG | 9563 |
| hs132667645 | ATGATGGCAGATTAGTTGTTTGG | 9564 |
| hs132667635 | AAGCCACATGAAGAAACATTTGG | 9565 |
| hs132667820 | ATTCTTTTGCAAACTCTCAATGG | 9566 |
| hs132667539 | GTTTCCACAGTTTTAACATTCGG | 9567 |
| hs132667772 | CCTAGACATGTAGTGAAAACTGG | 9568 |
| hs132667832 | CCATAAATGCTAACCCTCATTGG | 9569 |
| hs132667554 | TCCACAGCTCACAGGAACTTTGG | 9570 |
| hs132667553 | GGAGGGTTACAAACTCCCTTTGG | 9571 |
| hs132667806 | TTACACATGTAAAGTTCATTAGG | 9572 |
| hs132667809 | CTAAGAACAACTTTCTTGATTGG | 9573 |
| hs132667547 | ACTTAGTTCTTTTACTTAATGGG | 9574 |
| hs132667601 | GCTTTGTTTCCCCTTAAAAATGG | 9575 |
| hs132667543 | TGGATGCTACAAAAATTTTATGG | 9576 |
| hs132667544 | ACCAGATGTTAATTGATTAATGG | 9577 |
| hs132667845 | GAGATTTCTTTGGCAATAAATGG | 9578 |
| hs132667105 | AGACAGGAGAGGGACTACGAAGG | 9579 |
| hs132667274 | GTAGACCTCTTTGTACAAGGGGG | 9580 |
| hs132667013 | ATAATGATTACCATCCCAAGAGG | 9581 |
| hs132667332 | AATACCTGGACACAAGCTGAGGG | 9582 |
| hs132667188 | ATAAGTTTTAATGGGCATGGAGG | 9583 |
| hs132667380 | TAGACAAGAAAGCATTTGAGGGG | 9584 |
| hs132667017 | GTTTCCAAGGAAGTCACAAGAGG | 9585 |
| hs132667103 | TTAGGAAATATAGACAGGAGAGG | 9586 |
| hs132667484 | CTTCCAGCCCAATAGTAACGGGG | 9587 |
| hs132667130 | AAACCATCATCTATGACATGAGG | 9588 |
| hs132667001 | AGGCCATCACCTCAATACATGGG | 9589 |
| hs132667397 | AAATTATGAGACCACCACCTAGG | 9590 |
| hs132667357 | GGAAAAGAGAAATTAAAAGGAGG | 9591 |
| hs132667036 | ATCTCCCTGCCTCATACACGAGG | 9592 |
| hs132667046 | GCTGAAATAAGAAGATCCTGAGG | 9593 |
| hs132666968 | GTCAAACTGTAGGAAATAAGGGG | 9594 |
| hs132667205 | AAGCTGAGTTACTAATCACAAGG | 9595 |
| hs132667438 | GGCAGATCACATAAAACAGGAGG | 9596 |
| hs132667203 | AAAAGATCAGATGGTCACAAAGG | 9597 |
| hs132666998 | TTTGTGAGCCAAGACATGAGAGG | 9598 |
| hs132667407 | TCACATTTCAGGGAGCATTGTGG | 9599 |
| hs132667383 | ATACAATGAAGATAAAATGGAGG | 9600 |
| hs132667111 | TATTCAGCAGCTGAACCACAAGG | 9601 |
| hs132667342 | TTCTTTATATGAGTACAACTGGG | 9602 |
| hs132666994 | CTGCCAAAAGTATGAACAGGAGG | 9603 |
| hs132666955 | TCAGTAAAGACTGCTTGGAGTGG | 9604 |
| hs132667362 | CTGTTTTTGAGCTCACAGGAAGG | 9605 |
| hs132667333 | TAATACCTGGACACAAGCTGAGG | 9606 |
| hs132666972 | GTTTGACCAATATATTGAAGGGG | 9607 |
| hs132667096 | AGTTCTACCCTATATTTACAGGG | 9608 |
| hs132667037 | GGACTGATTCCTTTCATGTGAGG | 9609 |
| hs132666952 | TGTGAGAAGTATTGAAACAGAGG | 9610 |
| hs132667435 | ATGTATTGCAAAGAAGCCATGGG | 9611 |
| hs132667038 | CAGTCCTCGTGTATGAGGCAGGG | 9612 |
| hs132667033 | TTTGCCAAGAGGTAAGGGAAGGG | 9613 |
| hs132667326 | TAATAACTCTTGCTATCTGGAGG | 9614 |
| hs132667052 | ACATATCTTTACCTATGTGAGGG | 9615 |
| hs132667011 | AACGTTACAATCGTCATGAGAGG | 9616 |
| hs132667335 | TGAAAAAATAATCAGCTAGGAGG | 9617 |
| hs132667178 | AATACTGAAATTGTAAACAATGG | 9618 |
| hs132667134 | ACAATGCTAGACATAAACATTGG | 9619 |
| hs132667222 | CAGTGTTAGATGGTATGTAGAGG | 9620 |
| hs132667493 | TTTTTATTTAACTAAACACAGGG | 9621 |
| hs132667088 | CAACATGATATACTGTGAAGCGG | 9622 |
| hs132667149 | AGCATCCTGATATTATTCCAGGG | 9623 |
| hs132667401 | AAAAAGTAGTCCCATTCCAAGGG | 9624 |
| hs132667426 | TTTATGGCAGCAATAATCTGTGG | 9625 |
| hs132667385 | ATACATGCTGTAATGCATGTTGG | 9626 |
| hs132667489 | GTCTTGTTGTTGGAGAATGGTGG | 9627 |
| hs132667320 | TATGTTTATAAAAAATTACAGGG | 9628 |
| hs132667456 | TCTATATTGAGACAAGTACATGG | 9629 |
| hs132667424 | AATGGCAATCTTTCTTAACACGG | 9630 |
| hs132667192 | AAAAACCAACTCCACAGGCATGG | 9631 |
| hs132667488 | GTTGTTGGAGAATGGTGGTGAGG | 9632 |
| hs132667481 | GGAACTGAGTGACTTAGAGCAGG | 9633 |
| hs132667392 | CATCACGTCAATTGCCTAGGTGG | 9634 |
| hs132667016 | ATATAAGTTGGATTGCCAGAAGG | 9635 |
| hs132667416 | GAGCTGTAACAGTTAACTGTAGG | 9636 |
| hs132667271 | TATATCCCCCTTGTACAAAGAGG | 9637 |
| hs132667348 | AATGGTTAAAACCTATTGTGAGG | 9638 |
| hs132667471 | TTAGTTATACTAACACATACGGG | 9639 |
| hs132667112 | AGAATTTTATAGAAACCTTGTGG | 9640 |
| hs132667120 | GCATACTGGTATTTTTCACGTGG | 9641 |
| hs132667236 | TTTTTTAGCTGCCTTTCCAGTGG | 9642 |
| hs132667476 | GAGCAGGCGAACAAAATGCTGGG | 9643 |
| hs132667322 | TTTTTAAAGAAGTCAATCCAGGG | 9644 |
| hs132667324 | AGGCTTACAATGAGAAAAGAGGG | 9645 |
| hs132667197 | GCCTTGTGCTACCATGCCTGTGG | 9646 |
| hs132667073 | ACTTTCTTTGCATACAGTGGAGG | 9647 |
| hs132667454 | ACATCTGATAAGTAGCACTTAGG | 9648 |
| hs132666963 | TTGGTTCACTGAAATAGCAAGGG | 9649 |
| hs132667237 | GCCTTTCCAGTGGCAAAAGTAGG | 9650 |
| hs132667104 | TAGGAAATATAGACAGGAGAGGG | 9651 |
| hs132667391 | AGACATCACGTCAATTGCCTAGG | 9652 |
| hs132667459 | AAATTCATAGCTCAATGCACAGG | 9653 |
| hs132667132 | TTATGGTATATGAATGTGGATGG | 9654 |
| hs132667235 | AACATCCTATCCCTATTCAAAGG | 9655 |
| hs132667446 | ACTGTGATTGAAAATCATATAGG | 9656 |
| hs132667483 | GCTGGAAGAAATTCACTCTAGGG | 9657 |
| hs132667277 | TTGTAGACCTCTTTGTACAAGGG | 9658 |
| hs132667220 | GTATGTAGAGGAAGGCCAGATGG | 9659 |
| hs132666997 | GATGGATGAACTGTTGCCCCCGG | 9660 |
| hs132667202 | TCCTTGGGCAAAAGATCAGATGG | 9661 |
| hs132667028 | GCTCCTTTGCTTGTAACCAGAGG | 9662 |
| hs132667226 | ACACATTCTATAATTAGGGATGG | 9663 |
| hs132667313 | AATCACATGTGCTGTTGAAAGGG | 9664 |
| hs132667299 | GAACTGCCATGTACAAGAAGAGG | 9665 |
| hs132667451 | AAGTTTGTAGTATTGCCTCCAGG | 9666 |
| hs132667487 | CCATTCTCCAACAACAAGACAGG | 9667 |
| hs132667109 | TGTCCAAAGCCAAGAAACATTGG | 9668 |
| hs132666988 | CCTGTTCATACTTTTGGCAGCGG | 9669 |
| hs132667444 | TTATTATGTAATGATTGTGTGGG | 9670 |
| hs132667247 | TTACAGACAATGCATTTACAAGG | 9671 |
| hs132666974 | AGTTTGACCAATATATTGAAGGG | 9672 |
| hs132667146 | ATGTAATCTTATGAGTAAGAAGG | 9673 |
| hs132667334 | GATTTGACTTGAATAATACCTGG | 9674 |
| hs132667152 | CTGCAAGAAGAGGCACACCCTGG | 9675 |
| hs132667431 | TGGAAGCAATGGGTACATATGGG | 9676 |
| hs132667083 | TGGATACATGTGCCCATGGAGGG | 9677 |
| hs132667139 | TCACTCAATGCATTAGAATGAGG | 9678 |
| hs132667208 | TGTATGCTACATTCAGCTATGGG | 9679 |
| hs132667014 | GGCAATCCAACTTATATGCAAGG | 9680 |
| hs132667093 | TTCTTATTTCTCCATCCCGAAGG | 9681 |
| hs132667291 | TGCCGAAGCAAGCACCTGATGGG | 9682 |
| hs132667317 | ATATATATCGATCAGGGCCAAGG | 9683 |
| hs132667376 | TGTAGTTCAGTGTGTCTGGAGGG | 9684 |
| hs132666962 | TTTGGTTCACTGAAATAGCAAGG | 9685 |
| hs132667330 | AATACCCTCAGCTTGTGTCCAGG | 9686 |
| hs132667144 | CTATCTTTTCTAAACGCTCAGGG | 9687 |
| hs132667021 | CTGCCTCTGGTTACAAGCAAAGG | 9688 |
| hs132667062 | GAGAAGATAAAACCTGTGCTTGG | 9689 |
| hs132667338 | GACCTTTTGAAGCAGTTGCATGG | 9690 |
| hs132667053 | TTACCTATGTGAGGGACTGAAGG | 9691 |
| hs132667145 | TGAGCGTTTAGAAAAGATAGTGG | 9692 |
| hs132667381 | ATAGACAAGAAAGCATTTGAGGG | 9693 |
| hs132667465 | TTTTGTCTTATGTAGTTGGATGG | 9694 |
| hs132667437 | ATGGCTTCTTTGCAATACATTGG | 9695 |
| hs132667234 | AGTCTCCTTTGAATAGGGATAGG | 9696 |
| hs132667170 | TGAGCATAGCTGATAAGAGTTGG | 9697 |
| hs132667227 | GGATGGATATTATCAAGTATAGG | 9698 |
| hs132667077 | TATAACTGCATGAATTAGCTTGG | 9699 |
| hs132667228 | ATATTATCAAGTATAGGCTTAGG | 9700 |
| hs132667395 | TGGTGGTCTCATAATTTCTAGGG | 9701 |
| hs132667060 | TTTCTACATTTGCCAAGCACAGG | 9702 |
| hs132667447 | TGATTGAAAATCATATAGGCTGG | 9703 |
| hs132667486 | TTCTTCCAGCCCAATAGTAACGG | 9704 |
| hs132666983 | TGAGTTCCCATATTCATCACTGG | 9705 |
| hs132667455 | ATGTACTTGTCTCAATATAGAGG | 9706 |
| hs132667300 | AATTTGCCTCTTCTTGTACATGG | 9707 |
| hs132667042 | GGAATCAGTCCTCGTGTATGAGG | 9708 |
| hs132667287 | TTGGGTATAATAAAAAGCACTGG | 9709 |
| hs132667155 | TGTGTTATTTTGATAGGCCTGGG | 9710 |
| hs132667092 | CTACTTCATTTCCTTCGGGATGG | 9711 |
| hs132667477 | AGAGCAGGCGAACAAAATGCTGG | 9712 |
| hs132667184 | TCTATGTATATGTAACCCTTTGG | 9713 |
| hs132667439 | TGTTTTATGTGATCTGCCCATGG | 9714 |
| hs132667000 | GAGGCCATCACCTCAATACATGG | 9715 |
| hs132667427 | GCAATAATCTGTGGAAGCAATGG | 9716 |
| hs132667159 | ATGTGCATTTTTTAAACAAGTGG | 9717 |
| hs132667098 | TTATTCTGATTGTATGAAGTAGG | 9718 |
| hs132667031 | CTGAATTTGCCAAGAGGTAAGGG | 9719 |
| hs132667189 | AACTTATTGATCACTCCAAAGGG | 9720 |
| hs132667412 | ATGCTCCCTGAAATGTGAAAAGG | 9721 |
| hs132667289 | GGAGTTTTAAATCTCCCATCAGG | 9722 |
| hs132667480 | GTTCCCCGTTACTATTGGGCTGG | 9723 |
| hs132667119 | ATCGTCCCTATTTTGCCGTAAGG | 9724 |
| hs132667418 | CCTAAACATGTCCCTTAAAAGGG | 9725 |
| hs132667301 | ATATGTATTTTATCTTAAAGAGG | 9726 |
| hs132667464 | CAACTACATAAGACAAAAAGAGG | 9727 |
| hs132667201 | TGAACTTTGGGAGAATCCTTGGG | 9728 |
| hs132667086 | CATTTCCCTTTACCCTCCATGGG | 9729 |
| hs132667337 | TGCCATGCAACTGCTTCAAAAGG | 9730 |
| hs132666989 | CTGTTCATACTTTTGGCAGCGGG | 9731 |
| hs132667350 | ACATTTTCTATAATGATTGTGGG | 9732 |
| hs132667213 | ATATTATATGATAATTAAGAAGG | 9733 |
| hs132667194 | GTGGAGTTGGTTTTTAAGCATGG | 9734 |
| hs132667039 | TCAGTCCTCGTGTATGAGGCAGG | 9735 |
| hs132667294 | CAGGATATAGATGATATAGAAGG | 9736 |
| hs132667151 | GCACACCCTGGAATAATATCAGG | 9737 |
| hs132667399 | ACTGATTTGATTATTCCAATTGG | 9738 |
| hs132667018 | AACAGACCTTGCATATAAGTTGG | 9739 |
| hs132667157 | GAGCATAGTTTGTTTTTCCCAGG | 9740 |
| hs132667415 | TCTAGTTCATTTGCATTGCATGG | 9741 |
| hs132667297 | TTTTGGGCATCCTTGAATGTAGG | 9742 |
| hs132667085 | ATGTGCCCATGGAGGGTAAAGGG | 9743 |
| hs132667463 | ACATATTCTGCCACATAGCCTGG | 9744 |
| hs132667206 | CTTTATCTTATGAAGTATAGAGG | 9745 |
| hs132666957 | GAGAAACTGTTCTTGCTTGTTGG | 9746 |
| hs132667494 | ACACAGGGCAAAAACTAATCTGG | 9747 |
| hs132667095 | GCATTCACCCTGTAAATATAGGG | 9748 |
| hs132667250 | TCTCAAATACCTATTATAGTTGG | 9749 |
| hs132667136 | AATATCTTATAGAAGAACTTTGG | 9750 |
| hs132667440 | ATAGTACTAAAACTACTATTAGG | 9751 |
| hs132667485 | TCTTCCAGCCCAATAGTAACGGG | 9752 |
| hs132667254 | AGTTACATCTCAAATAACTTTGG | 9753 |
| hs132667117 | AGGAACCTTACGGCAAAATAGGG | 9754 |
| hs132666977 | AATGTTCTAGGCAATGGAATTGG | 9755 |
| hs132667078 | GCACAAATGTTCTATGAGATTGG | 9756 |
| hs132667318 | GCAGTTTTTTCTAATTGCCTTGG | 9757 |
| hs132667496 | ATCTGGTTGCTTCTTTTGTAGGG | 9758 |
| hs132667421 | TTGACGTGCATCCCTTTTAAGGG | 9759 |
| hs132667225 | TTCATTACTTCAGTGTTAGATGG | 9760 |
| hs132667233 | AATTAAGTCTCCTTTGAATAGGG | 9761 |
| hs132667186 | AGTGATCAATAAGTTTTAATGGG | 9762 |
| hs132667365 | GGATTGATCCAAATCTTTGCTGG | 9763 |
| hs132667370 | ATTTATTTCTAGCCCACAATAGG | 9764 |
| hs132667331 | GGGTATTTAAGTTGATTAGAAGG | 9765 |
| hs132667498 | ATAGTCTGTAGCATGATAATTGG | 9766 |
| hs132667268 | GTTTAATTAAAAATACTCTAAGG | 9767 |
| hs132667224 | TGAAACACATTCTATAATTAGGG | 9768 |
| hs132667091 | AATACTACTTCATTTCCTTCGGG | 9769 |
| hs132666992 | ATACTTTTGGCAGCGGGCCGGGG | 9770 |
| hs132666967 | GGTCAAACTGTAGGAAATAAGGG | 9771 |
| hs132667212 | ATTATTGTCAAATACTTAGAAGG | 9772 |
| hs132667429 | AGATTATTGCTGCCATAAAATGG | 9773 |
| hs132666960 | TGTTTTATCTGACTTAAGTTTGG | 9774 |
| hs132667099 | TCATGTACTAAATTTCCTTATGG | 9775 |
| hs132667387 | GTATCTCTTCACTTGCTCATAGG | 9776 |
| hs132667371 | GTGGGCTAGAAATAAATAAAAGG | 9777 |
| hs132666964 | TTAGCGCCCCTTCAATATATTGG | 9778 |
| hs132667319 | GTATGTTTATAAAAAATTACAGG | 9779 |
| hs132667071 | AAGAAAATGCAGTTTTTAGTAGG | 9780 |
| hs132667230 | TTTTTTTGTCAGGAGATAATAGG | 9781 |
| hs132667110 | TAGAATTCTTTGATTGACTATGG | 9782 |
| hs132667479 | CTCAGTTCCCCGTTACTATTGGG | 9783 |
| hs132667059 | ATCCTTTTAGCCTACCAAAATGG | 9784 |
| hs132667267 | GTATTTTTAATTAAACTTACTGG | 9785 |
| hs132666987 | TTACCTCCTGTTCATACTTTTGG | 9786 |
| hs132667045 | TCTTATTTCAGCTTCCAAATTGG | 9787 |
| hs132667165 | ATAATATGTAAATAATTAAATGG | 9788 |
| hs132667265 | ACTAGTCGTGGAGAGCTTTCAGG | 9789 |
| hs132667253 | TTGCTATCTCCAACTATAATAGG | 9790 |
| hs132666675 | AGTCTCACAAAACTGCAGAGCGG | 9791 |
| hs132666123 | GCTTTGTGGAGTCAACACCATGG | 9792 |
| hs132666149 | TAACCTATTCATAAGCACAGAGG | 9793 |
| hs132666112 | ATGGTTTAGACACAGAACTGGGG | 9794 |
| hs132666823 | CTTCAGATGATACAAAAACGGGG | 9795 |
| hs132666413 | CAAGGAGTGTGAAAACACGTGGG | 9796 |
| hs132666766 | CTGAGCCATATACCTCACTGTGG | 9797 |
| hs132666773 | ACAGAACTAGAGATGTCAGGTGG | 9798 |
| hs132666374 | AACAATGTGACAGATGACAGAGG | 9799 |
| hs132666082 | GTGAATTTGAAAGTGACTGGTGG | 9800 |
| hs132666415 | GCAAAAACTGCATGACCCAGAGG | 9801 |
| hs132666761 | GGGCAGTTCTCTCCACAGTGAGG | 9802 |
| hs132666915 | CTATAGGTGATAAACTACTGTGG | 9803 |
| hs132666190 | ACTCAGGGAGAGTACATGGGAGG | 9804 |
| hs132666329 | CCATGTGGAAACAAGCAGAGAGG | 9805 |
| hs132666571 | GATGACTTGGACCCTGTGGGAGG | 9806 |
| hs132666871 | TCCAAGCACTCTACTCACGATGG | 9807 |
| hs132666787 | AAGATGGAGGAAGATTGTGGTGG | 9808 |
| hs132666876 | TAGCCAAGCTGACACAACCAGGG | 9809 |
| hs132666259 | TTCAAAATATCAAAAGCCTGGGG | 9810 |
| hs132666201 | GGTCTGAGTAGGATCCGGGAAGG | 9811 |
| hs132666689 | AAAACAGACCAGGTGAACTGAGG | 9812 |
| hs132666451 | AAGCATGACTCTCCAAACTGTGG | 9813 |
| hs132666923 | ACTGACATTACAGGTACCCGAGG | 9814 |
| hs132666444 | GTGTACCTCAAAATGGCTGAAGG | 9815 |
| hs132666786 | AGATGGAGGAAGATTGTGGTGGG | 9816 |
| hs132666092 | CATGCCAGCCTAGTACCTTGAGG | 9817 |
| hs132666499 | TATTACAACATAGCAAGGCGAGG | 9818 |
| hs132666352 | TATCTTCCCCCCTTCCACAGAGG | 9819 |
| hs132666277 | AGAACACAGTGCCCATCAGGAGG | 9820 |
| hs132666147 | ATTTTACTAGGGCAGTGGTGAGG | 9821 |
| hs132666510 | CTTCCCAGTCTATGAAACCAAGG | 9822 |
| hs132666191 | GGCACTCAGGGAGAGTACATGGG | 9823 |
| hs132666542 | AAAGTGACAATTCATTGCAGGGG | 9824 |
| hs132666715 | AGTGATATTATTGTACACGTAGG | 9825 |
| hs132666570 | GATGATGACTTGGACCCTGTGGG | 9826 |
| hs132666296 | GAAATACGTTAACCATTGCAGGG | 9827 |
| hs132666826 | ATTGATAATTGTCTACAGGGTGG | 9828 |
| hs132666833 | CTGAGGTAGCTACAAAACCTGGG | 9829 |
| hs132666343 | TGTAAGTGTGTCTCCCTCTGTGG | 9830 |
| hs132666845 | TTTCAGGAAAGAGTGGCTAGTGG | 9831 |
| hs132666648 | TCATAAGGAAAGAGAATCAGGGG | 9832 |
| hs132666500 | GCAAGGCGAGGAATTTCCGAAGG | 9833 |
| hs132666573 | AGTCATCATCCAATGCATGGTGG | 9834 |
| hs132666183 | ATTGCTGGCATAAAGAGATGAGG | 9835 |
| hs132666750 | GAATGCCATAGGAAGCACTTGGG | 9836 |
| hs132666804 | GCCAGGCTCGAATCAATGAGAGG | 9837 |
| hs132666492 | TCATTGACTCTAGTGTCCCATGG | 9838 |
| hs132666694 | TGTCCTCAAGGATAATGTAGAGG | 9839 |
| hs132666024 | AGAGATCTTTGGAGCCACCAGGG | 9840 |
| hs132666211 | CATCTCAGCAAAGATATCTGAGG | 9841 |
| hs132666177 | ATCTCTTTATGCCAGCAATGAGG | 9842 |
| hs132666407 | TGACATTTTAGAATTTGTGGGGG | 9843 |
| hs132666888 | ATTAGAATTTGTGTATACCAGGG | 9844 |
| hs132666693 | ATGCCTCTACATTATCCTTGAGG | 9845 |
| hs132666065 | AGAGACTTAGAGCCCAACTTGGG | 9846 |
| hs132666179 | AAAGAGATGAGGCTATCCACTGG | 9847 |
| hs132666080 | TCTCATATTTATGAGTCAGAGGG | 9848 |
| hs132666795 | TTTGCATTTGATGAACATTGAGG | 9849 |
| hs132666626 | AAAGAATCAGGAGTCCGTAAGGG | 9850 |
| hs132666603 | AAGAGACAGGTTTCTGACCAGGG | 9851 |
| hs132666905 | GTTCTCGTAAACTACCAGGATGG | 9852 |
| hs132666084 | AGATAGTCTAAATCAAATGAGGG | 9853 |
| hs132666087 | TGAAACTCAAACGTGCCTCAAGG | 9854 |
| hs132666540 | TATGCGAACAAAACTTACATGGG | 9855 |
| hs132666685 | ATTCTGTCTGCTTACCCTGGAGG | 9856 |
| hs132666569 | GGATGATGACTTGGACCCTGTGG | 9857 |
| hs132666806 | GATCTGTGTGATACTCCCATAGG | 9858 |
| hs132666113 | AACTGGGGCTCAGCTCACACTGG | 9859 |
| hs132666730 | ATTATTAAAGATCATCAGGATGG | 9860 |
| hs132666434 | AATAAATGTGGGTCACTAGAGGG | 9861 |
| hs132666173 | CCCAGAACTCTAAGAGATGGTGG | 9862 |
| hs132666582 | GTTTAAATAACTTCCAACCCGGG | 9863 |
| hs132666248 | TTGTAAAGTCCCATCATACAGGG | 9864 |
| hs132666050 | TTACTGACATTCAGTGACATGGG | 9865 |
| hs132666611 | GGAAACTCAACTTTCTCCTGGGG | 9866 |
| hs132666575 | AGTTTAAATTGCCTCCCACAGGG | 9867 |
| hs132666029 | CTACTGATAAATTTAAAGAGCGG | 9868 |
| hs132666719 | TAGATAGTTAAGAAACTATGTGG | 9869 |
| hs132666904 | TCATGTTCTCGTAAACTACCAGG | 9870 |
| hs132666174 | ACTCCCAGAACTCTAAGAGATGG | 9871 |
| hs132666160 | TTGATTTCATGGGAAACAGGTGG | 9872 |
| hs132666698 | TTTATGAACGCTTTACTTGGGGG | 9873 |
| hs132666788 | ATGAAGATGGAGGAAGATTGTGG | 9874 |
| hs132666281 | AAATGTGTAAACTTTGAGAGTGG | 9875 |
| hs132666491 | AGATAATCAAGTGTTGCCATGGG | 9876 |
| hs132666219 | ACTTTGCACTAAGTGAGCCTGGG | 9877 |
| hs132666649 | TTATGACAGCCCCCATAAAGGGG | 9878 |
| hs132666276 | TGTCAGAAGAGCCTCCTGATGGG | 9879 |
| hs132666536 | TTACTTCATACTTCTGCTGGAGG | 9880 |
| hs132666574 | CCAAGTCATCATCCAATGCATGG | 9881 |
| hs132666027 | AATGAATAATTTATCCCTGGTGG | 9882 |
| hs132666483 | ATATAATGTGGTTAAGACCATGG | 9883 |
| hs132666898 | TTAGGTATTATGTAAATCAGTGG | 9884 |
| hs132666831 | GACATTTTACTATACAGCCCAGG | 9885 |
| hs132666485 | AAGACTTTTGGAGCTCACCATGG | 9886 |
| hs132666586 | ACTAGATCCTTTTGGAACCCGGG | 9887 |
| hs132666249 | TTTACAAGTTTTAATTTCAGGGG | 9888 |
| hs132666130 | AGGGAGGCCTGGACACCAGTTGG | 9889 |
| hs132666682 | CTGCATCCTAACTACATAGGAGG | 9890 |
| hs132666797 | GCAGTTGCTGGATGCACAAGCGG | 9891 |
| hs132666505 | AGAAAGTGAGAAATGGCATAGGG | 9892 |
| hs132666652 | TGAATTCTAGAGAATGCTATGGG | 9893 |
| hs132666220 | TCGTTCGTAATTAAATACCCAGG | 9894 |
| hs132666768 | ACATGAAATGACGGAAATGATGG | 9895 |
| hs132666412 | CCAAGGAGTGTGAAAACACGTGG | 9896 |
| hs132666168 | GGACAAAAAGAGTTTTAGCAAGG | 9897 |
| hs132666328 | CATGTGGAAACAAGCAGAGAGGG | 9898 |
| hs132666827 | TTAATTGATAATTGTCTACAGGG | 9899 |
| hs132666836 | AGCTACAGTGTACCTCAGACAGG | 9900 |
| hs132666506 | GAGAAAGTGAGAAATGGCATAGG | 9901 |
| hs132666122 | GTGGAGATAACCAATATACTTGG | 9902 |
| hs132666912 | AGACATTTAATGCAAAACTAGGG | 9903 |
| hs132666841 | GCCTAAATGAGAAGTCCCATTGG | 9904 |
| hs132666523 | TCTCTCTCAAAAATATGCAATGG | 9905 |
| hs132666395 | ACTGCAATCAACGATTCTATGGG | 9906 |
| hs132666370 | ATAGGCTTTTTATTATAACTGGG | 9907 |
| hs132666301 | AGAGCCCTGGGACCCTGCAATGG | 9908 |
| hs132666216 | AATGCCATCTGCAAAGCACTGGG | 9909 |
| hs132666462 | GCTATTACAGATAACATACAAGG | 9910 |
| hs132666812 | ACAAGTCAGGTAAAGAGTCGTGG | 9911 |
| hs132666512 | GGTTTCATAGACTGGGAAGGGGG | 9912 |
| hs132666128 | GTCTGTGAAGATTTTAAGGGAGG | 9913 |
| hs132666111 | AATGGTTTAGACACAGAACTGGG | 9914 |
| hs132666633 | ATATCAACACGAAAGAAGACAGG | 9915 |
| hs132666055 | TATAATTCACTGGTTTGGGTAGG | 9916 |
| hs132666043 | ACCGTCAAGTTTCTGACCCATGG | 9917 |
| hs132666198 | CTGAACCTAAAACTAAGCGTTGG | 9918 |
| hs132666401 | ATTTAATACCAAATTAAGGTAGG | 9919 |
| hs132666062 | GCTTGCAGATAGAGAGACACAGG | 9920 |
| hs132666849 | GTTTGGAGAATGGATTGTGTTGG | 9921 |
| hs132666262 | ATATTTGGTATATATGCCCCAGG | 9922 |
| hs132666035 | CCGTTGAAGTAATTAAGCATAGG | 9923 |
| hs132666846 | TTTTTGTTTTCAGGAAAGAGTGG | 9924 |
| hs132666273 | TTTTAAACATTTATATACACAGG | 9925 |
| hs132666275 | ATGTCAGAAGAGCCTCCTGATGG | 9926 |
| hs132666214 | CATGAAGACATTTAAATCAGAGG | 9927 |
| hs132666819 | ATATTCAGTGAAATATTAGTGGG | 9928 |
| hs132666600 | AGAGATATAAAAATGATGCCAGG | 9929 |
| hs132666748 | AGAATAATACTGAATGCCATAGG | 9930 |
| hs132666439 | AATTGAAGACAAGCTCTGAAAGG | 9931 |
| hs132666227 | TTATGTGAGTTGTTAAAGTGGGG | 9932 |
| hs132666175 | TCTCTCCAATATTCTGCCAGTGG | 9933 |
| hs132666372 | TCAGTGGTTTACACAGCACCTGG | 9934 |
| hs132666398 | AAAATATTTTGACGTCTGGTAGG | 9935 |
| hs132666119 | ATATACTTGGCAGAGCCTCTAGG | 9936 |
| hs132666178 | CTTTATGCCAGCAATGAGGATGG | 9937 |
| hs132666097 | TTTCTGCAGTGAATTGGAGGTGG | 9938 |
| hs132666046 | AACTTGAAATTAAGAGACTAGGG | 9939 |
| hs132666875 | TTAGCCAAGCTGACACAACCAGG | 9940 |
| hs132666548 | GACTGGATAATTAAAGAGTAGGG | 9941 |
| hs132666890 | ATATGCTGCTTAAAAACATACGG | 9942 |
| hs132666298 | TTAACCATTGCAGGGTCCCAGGG | 9943 |
| hs132666225 | TTCAATGCCATATTCAACGTTGG | 9944 |
| hs132666094 | GTTGGAGAAAGATTTCTACTAGG | 9945 |
| hs132666210 | GATATCTTTGCTGAGATGCATGG | 9946 |
| hs132666236 | GGAAAGTAAGTTAAGCACTAAGG | 9947 |
| hs132666232 | GGACTGATTCCAAAGGTGTAGGG | 9948 |
| hs132666546 | TTAAAGAGTAGGGAAGCATTGGG | 9949 |
| hs132666348 | TGTCTCCCTCTGTGGAAGGGGGG | 9950 |
| hs132666840 | CCTAAATGAGAAGTCCCATTGGG | 9951 |
| hs132666044 | GATTGAGTTGTTATTTATCGAGG | 9952 |
| hs132666794 | AGTAGGTATGGTTAATTGGAAGG | 9953 |
| hs132666327 | GAGGGACAAGTTTTCCCAGAAGG | 9954 |
| hs132666894 | TTACAATAACTGGAATGAAAGGG | 9955 |
| hs132666300 | CAATGGTTAACGTATTTCACAGG | 9956 |
| hs132666322 | GAAAGGGGAAGAGTAGAGAGAGG | 9957 |
| hs132666709 | AATAGATCTAGTTTTACCCTAGG | 9958 |
| hs132666860 | CTGTTTGGAGAACTGTTGGAGGG | 9959 |
| hs132666623 | TGTAGAGTATGAGAGGGTAAAGG | 9960 |
| hs132666734 | GAACAATTCCAGGAAGAGCTAGG | 9961 |
| hs132666417 | AACTGCATGACCCAGAGGATGGG | 9962 |
| hs132666042 | ACCATGGGTCAGAAACTTGACGG | 9963 |
| hs132666030 | CCTATGCTTAATTACTTCAACGG | 9964 |
| hs132666585 | GATCCTTTTGGAACCCGGGTTGG | 9965 |
| hs132666230 | ATACATAAGTTCATTAGCAATGG | 9966 |
| hs132666760 | AGTAAATCAATTAGAAAGGAGGG | 9967 |
| hs132666351 | ATCTTCCCCCCTTCCACAGAGGG | 9968 |
| hs132666364 | CAAAACCTCTTTAATTAGAGAGG | 9969 |
| hs132666625 | GAAAGAATCAGGAGTCCGTAAGG | 9970 |
| hs132666167 | AGGAAATCAGAGATGTTTGAAGG | 9971 |
| hs132666085 | GAGATAGTCTAAATCAAATGAGG | 9972 |
| hs132666511 | TCTATGAAACCAAGGTAAGATGG | 9973 |
| hs132666541 | GTATGCGAACAAAACTTACATGG | 9974 |
| hs132666929 | GCTTTTATCTGCAAATGAAGTGG | 9975 |
| hs132666604 | ATTCTTAGTAAAGTCTTCCCTGG | 9976 |
| hs132666337 | ATTACAGAATATTATTAAAGGGG | 9977 |
| hs132666068 | GGATTTTATTCCATTGGAGGAGG | 9978 |
| hs132666017 | TTAATACTAATAGAGGTGTCAGG | 9979 |
| hs132666837 | ATCTTTCTGTATGTGCCCAATGG | 9980 |
| hs132666064 | GTTGGGCTCTAAGTCTCTACAGG | 9981 |
| hs132666438 | ATTGAAGACAAGCTCTGAAAGGG | 9982 |
| hs132666245 | CCATAAATAATAACAAATTGAGG | 9983 |
| hs132666507 | ACACGTGAGAAAGTGAGAAATGG | 9984 |
| hs132666235 | AGCACTAAGGAATATATTAGTGG | 9985 |
| hs132666189 | GTACTCTCCCTGAGTGCCAATGG | 9986 |
| hs132666120 | TGGTTATCTCCACACAAAGAAGG | 9987 |
| hs132666579 | AGAGAAGTCAACATGCTTGTGGG | 9988 |
| hs132666423 | GCACAGAAGTGTGTTTCAAAGGG | 9989 |
| hs132666803 | GGAGTCAGTCACTTAGAGCCAGG | 9990 |
| hs132666140 | CCTTTTATACAAAGATCGTATGG | 9991 |
| hs132666686 | TTCTGTCTGCTTACCCTGGAGGG | 9992 |
| hs132666154 | TGAAAGGGAAGAACTCCAACAGG | 9993 |
| hs132666791 | TATGTGTGCAATGTATAAGTAGG | 9994 |
| hs132666034 | CGTTGAAGTAATTAAGCATAGGG | 9995 |
| hs132666449 | CTGTGGACATATTTTCTCAAGGG | 9996 |
| hs132666514 | TTGGTTTCATAGACTGGGAAGGG | 9997 |
| hs132666702 | TAGCAACCAGGCAGAATGAATGG | 9998 |
| hs132666583 | CTTCCAACCCGGGTTCCAAAAGG | 9999 |
| hs132666315 | ATTAAAATGTCTTCTCACTTCGG | 10000 |
| hs132666132 | TATCAGAACTACGTGCCAACTGG | 10001 |
| hs132666023 | AAGAGATCTTTGGAGCCACCAGG | 10002 |
| hs132666238 | GGATAGAGTCTGATAACATTCGG | 10003 |
| hs132666868 | TGATGGAGTGAAAAGCATAATGG | 10004 |
| hs132666493 | AGTGCAGCTTCCATAGACTTTGG | 10005 |
| hs132666576 | AAGTTTAAATTGCCTCCCACAGG | 10006 |
| hs132666621 | AGAAGGGAGTGAAGCTGGAGAGG | 10007 |
| hs132666610 | TGGAAACTCAACTTTCTCCTGGG | 10008 |
| hs132666435 | TTTATTTATCATAAGGACATAGG | 10009 |
| hs132666538 | CCAGCAGAAGTATGAAGTAAAGG | 10010 |
| hs132666411 | AGGAATTAGTTATAAAGCCAAGG | 10011 |
| hs132666628 | GAACTATCTGTATTCCCTTACGG | 10012 |
| hs132666345 | GTGTGTCTCCCTCTGTGGAAGGG | 10013 |
| hs132666558 | TCTTCATGACAGTTTATGCTGGG | 10014 |
| hs132666477 | GGAAATTAAGGGAAATTCCAAGG | 10015 |
| hs132666090 | TGAGGCACGTTTGAGTTTCAGGG | 10016 |
| hs132666814 | AAAGAGTCGTGGGTGACAACTGG | 10017 |
| hs132666047 | CTAGTCTCTTAATTTCAAGTTGG | 10018 |
| hs132666848 | ACACAATCCATTCTCCAAACAGG | 10019 |
| hs132666725 | GTAAATAAGGATACCCTAATGGG | 10020 |
| hs132666614 | AGTTTCCAATTATTAATTCAGGG | 10021 |
| hs132666897 | CAGTGGATATATTAAAATGATGG | 10022 |
| hs132666671 | ATTAGGTCCTTCAAATAACTTGG | 10023 |
| hs132666363 | ACTTACCTCTCTAATTAAAGAGG | 10024 |
| hs132666326 | CCTCTCTGCTTGTTTCCACATGG | 10025 |
| hs132666096 | CTGCAGTGAATTGGAGGTGGTGG | 10026 |
| hs132666815 | TGGTAGTGTGTCACAGAAGCTGG | 10027 |
| hs132666747 | GAAGGTAGACATAAAATTAGTGG | 10028 |
| hs132666589 | AAGTACACGTCAGATTGAAATGG | 10029 |
| hs132666690 | TGGTCTGTTTTTTCCCTCCAGGG | 10030 |
| hs132666822 | GCTTCAGATGATACAAAAACGGG | 10031 |
| hs132666883 | ATAATTCCAAAGTAAATCACTGG | 10032 |
| hs132666390 | ATCATTCAATTTGTATGCAAGGG | 10033 |
| hs132666522 | TTTTGATCTCACTTGAGAGTTGG | 10034 |
| hs132666067 | TATTCTTGTTCCTCCTCCAATGG | 10035 |
| hs132666019 | GCTGCTATTAATACTAATAGAGG | 10036 |
| hs132666737 | ATAGGCTTCCTTTGTTTTGACGG | 10037 |
| hs132666103 | TTGTATGTTTCCTTTTAAAACGG | 10038 |
| hs132666079 | CTGACTCATAAATATGAGATAGG | 10039 |
| hs132666153 | TTTGGACTCTTCTCACCTGTTGG | 10040 |
| hs132666508 | GATAAAGTAAAAGCCACAATTGG | 10041 |
| hs132666488 | TTTTCAGCATCAAAAATAAGTGG | 10042 |
| hs132666231 | ATAATGTGTCCCTACACCTTTGG | 10043 |
| hs132666141 | CATACGATCTTTGTATAAAAGGG | 10044 |
| hs132666641 | TTAACCTGCCCAGGAATAGATGG | 10045 |
| hs132666865 | TGTTTATAGACAACGCTTAGTGG | 10046 |
| hs132666673 | ACTAAAATCTGAAAGTTGTATGG | 10047 |
| hs132666389 | AACATACTAAGTATATAATTCGG | 10048 |
| hs132666879 | AAAGGCCCAGTGATTTACTTTGG | 10049 |
| hs132666013 | TATTTTTTGCTGTCTTAGGTTGG | 10050 |
| hs132666292 | CTTTCAGGTTTCTAAGGATGAGG | 10051 |
| hs132666810 | TCCTTCTGCCTTATTCCTATGGG | 10052 |
| hs132666830 | ACTGAACGAAGATAGCAAAAAGG | 10053 |
| hs132666642 | TCTATTCCTGGGCAGGTTAAGGG | 10054 |
| hs132666241 | GCTAAAGGAGATTTTAAGCTAGG | 10055 |
| hs132666243 | AAGATATACTTGAAGAATAGAGG | 10056 |
| hs132666161 | GCTTGAATTGTGTAAGAATTGGG | 10057 |
| hs132666552 | GAGAGGCATGGAAGACTTATGGG | 10058 |
| hs132666018 | GCAGCACTATTTTCCCTGTTAGG | 10059 |
| hs132666118 | AGAGGCTCTGCCAAGTATATTGG | 10060 |
| hs132666529 | GCATGTAGACTTAAACCTTCTGG | 10061 |
| hs132666127 | TCTGTCTGTGAAGATTTTAAGGG | 10062 |
| hs132666467 | TACACAGTACAGTAATTTAGTGG | 10063 |
| hs132666266 | ATTTTTATGGGAAATTCAACTGG | 10064 |
| hs132666706 | TCATGTAGCAGTTATTTTAAGGG | 10065 |
| hs132666447 | GAGAAAATATGTCCACAGTTTGG | 10066 |
| hs132666402 | TTAATCATTTCAAAATTCATTGG | 10067 |
| hs132666807 | GTGATACTCCCATAGGAATAAGG | 10068 |
| hs132666478 | TGAGGATTTTAGGAAATTAAGGG | 10069 |
| hs132666414 | CCACGTGTTTTCACACTCCTTGG | 10070 |
| hs132666650 | CTTATGACAGCCCCCATAAAGGG | 10071 |
| hs132666307 | TTAAAATGTTCATTAAGAATTGG | 10072 |
| hs132666906 | GGATGGATCCCATCTATTATAGG | 10073 |
| hs132666742 | ACGAATGTAATGTAATTTACTGG | 10074 |
| hs132666909 | AGAAGTACACCTATAATAGATGG | 10075 |
| hs132666726 | TATTTACCCAAAACAATTAAGGG | 10076 |
| hs132666470 | TTGTATACTTTGTACCCTAATGG | 10077 |
| hs132666724 | GGTAAATAAGGATACCCTAATGG | 10078 |
| hs132666736 | ACATAAAGAAGTGTAATAATAGG | 10079 |
| hs132666680 | ATTTATCCTCCTATGTAGTTAGG | 10080 |
| hs132666336 | AATTACAGAATATTATTAAAGGG | 10081 |
| hs132666163 | TATTTTATGTTGCTTCCATTTGG | 10082 |
| hs132666086 | GATTGCTCACTTCTACTTAGAGG | 10083 |
| hs132666176 | GCTATCCACTGGCAGAATATTGG | 10084 |
| hs132666379 | TTTGAGACCATGCAAATATAAGG | 10085 |
| hs132666524 | TGAGAGAGAGAAATATGATATGG | 10086 |
| hs132666445 | CTTTTGTGTGTACCTCAAAATGG | 10087 |
| hs132666052 | CCTTAAATACTCTCCTACTATGG | 10088 |
| hs132666665 | GTAATGACACTTTTGCCTATTGG | 10089 |
| hs132666799 | GATATAAAGCTTTAATTTGAGGG | 10090 |
| hs132666039 | CCTTAAATTGGGTACTTAAAGGG | 10091 |
| hs132666359 | TATCTTTCTGGTATTTTCTTGGG | 10092 |
| hs132666032 | TTACTTCAACGGATATTCTATGG | 10093 |
| hs132666440 | TTATCTGCATAACGAAAATATGG | 10094 |
| hs132666720 | CATAGTTTCTTAACTATCTAAGG | 10095 |
| hs132666105 | AGACATTTGACCGTTTTAAAAGG | 10096 |
| hs132666722 | TTAAATCCCTTAATTGTTTTGGG | 10097 |
| hs132666608 | ACCATCCCTGAATTAATAATTGG | 10098 |
| hs132666728 | GATACCCTAATGGGTAAAATTGG | 10099 |
| hs132666501 | GCTATGTTGTAATAAGTTAAAGG | 10100 |
| hs132666212 | AATGTCTTCATGCTTTAAATTGG | 10101 |
| hs132666853 | GCTCTGTTAATTTCTGTATTAGG | 10102 |
| hs132666106 | ATTCTCGTCTCTGTTCTTTATGG | 10103 |
| hs132666400 | ATAATCTTCCTACCTTAATTTGG | 10104 |
| hs132665858 | AGCCTGCCGAGTGAGAGTGTGGG | 10105 |
| hs132665800 | TACAGCTGAATGGAACCAGGTGG | 10106 |
| hs132665870 | ACTGGCTTGATGATTTCCAGCGG | 10107 |
| hs132665656 | TTAGAATAACTGGAACAATGTGG | 10108 |
| hs132665886 | GAAAATCTGGAGCTTCTGTGAGG | 10109 |
| hs132665669 | AGGGCCAACAAGATATCACAAGG | 10110 |
| hs132665649 | GTTATCTTCTCCTATCAGAGGGG | 10111 |
| hs132665639 | TAAATATCAAGAAAGACAGGAGG | 10112 |
| hs132665801 | TGACTATGTATTAAGCCACCTGG | 10113 |
| hs132665592 | AATACTGGAGTACAGATGGGAGG | 10114 |
| hs132665760 | GAAGCAAAGAATACAACACAGGG | 10115 |
| hs132665564 | ATTACTAATAAGTATATAGGCGG | 10116 |
| hs132665740 | TGAACATGGCAATTTCGAGGAGG | 10117 |
| hs132665715 | TACTTTGCAAGATAGACCTGTGG | 10118 |
| hs132665863 | TAGAAGAAAATATAGACTCGAGG | 10119 |
| hs132665981 | AAAATTATACCATCTCAGAAGGG | 10120 |
| hs132665914 | GCTCGTGTCATGAACTTGAGTGG | 10121 |
| hs132665651 | AGTAGAATGAGAACACTATGTGG | 10122 |
| hs132666006 | GAATCACAGATAACAAAGCACGG | 10123 |
| hs132665889 | AATCCCCTTGTGATCAAAGGAGG | 10124 |
| hs132665696 | TTTGAGGACGAACGTATGGGTGG | 10125 |
| hs132665892 | ATAGCCTCCTTTGATCACAAGGG | 10126 |
| hs132665881 | CCATAACGACTTGATAGGGAGGG | 10127 |
| hs132665939 | GATTTGCATTTTATCAATAGCGG | 10128 |
| hs132665987 | CCTTTCTCAGTATTTACATGTGG | 10129 |
| hs132665764 | AGAGGTGCTAATAAAGAAGGAGG | 10130 |
| hs132665849 | CAGTCATTCTAAAGTAGTGGGGG | 10131 |
| hs132665992 | ATATCTTATAATATATGACAGGG | 10132 |
| hs132665668 | ATTTAACTATTAATTCAGCAGGG | 10133 |
| hs132665897 | TGATACTAAAAGAATGTGAGAGG | 10134 |
| hs132665624 | GGAACGTGCACAATCATGGATGG | 10135 |
| hs132665925 | ATACATTGTATTTAGCCTGAGGG | 10136 |
| hs132665824 | GAAAATATACTTAGGATGCACGG | 10137 |
| hs132665876 | GGTAATCAAGTGCAGATCCGAGG | 10138 |
| hs132665799 | ATATACAGCTGAATGGAACCAGG | 10139 |
| hs132665652 | TTATGATGATAACATTTAGAGGG | 10140 |
| hs132665794 | AAAGCTAATGATAAAGACCTGGG | 10141 |
| hs132665968 | ATTTAGATGTGATCTTCCCATGG | 10142 |
| hs132665709 | GTGACTGTGTATCAACAAAGAGG | 10143 |
| hs132665915 | AATAACCTATATAAACCGACAGG | 10144 |
| hs132665810 | GGAAGAGGCTATCCTTCACCTGG | 10145 |
| hs132665839 | GCCAGAAGTCATTAACTGCAAGG | 10146 |
| hs132665591 | TAAAATACTGGAGTACAGATGGG | 10147 |
| hs132665997 | GTAACTGAACAATATATGAAAGG | 10148 |
| hs132665612 | GGTGCTTTGAAATTTTCAAGTGG | 10149 |
| hs132665891 | TAGCCTCCTTTGATCACAAGGGG | 10150 |
| hs132665803 | GATGAGCCTCAACCAGGTGAAGG | 10151 |
| hs132665853 | AGTCATAGTGCTGTTTTCGAGGG | 10152 |
| hs132665808 | GCCTCTTCCACTAAGGCAGGTGG | 10153 |
| hs132665733 | GAGTATTCAGATGATACCCTTGG | 10154 |
| hs132665711 | ATACACAGTCACTTAAAATGAGG | 10155 |
| hs132665879 | ATGACCATAACGACTTGATAGGG | 10156 |
| hs132665661 | ACATGCTCTGCTGTTGCTAGGGG | 10157 |
| hs132665697 | TCATTTGAGGACGAACGTATGGG | 10158 |
| hs132665617 | GCTAATTGGAAAGGGATCCTGGG | 10159 |
| hs132665941 | TAAAAGTTCCTGTTATCATGTGG | 10160 |
| hs132665934 | GAGAGTTCAGGTTGATAAAGGGG | 10161 |
| hs132665820 | AATTATTTCAAGCTTTTGTGGGG | 10162 |
| hs132665610 | ATTTTACATGGTGCTCTGAAGGG | 10163 |
| hs132665572 | TCAAAGTACTCCTATTTCCAAGG | 10164 |
| hs132665831 | TGATAGCAGGAGAGCCCACAGGG | 10165 |
| hs132665899 | ATTTAAAAGCTGACTTCTGGGGG | 10166 |
| hs132665851 | AGTAGTGGGGGTACAAAAGAGGG | 10167 |
| hs132665744 | GAGAAAGATAATATTGTCAAGGG | 10168 |
| hs132665871 | CTGGCTTGATGATTTCCAGCGGG | 10169 |
| hs132665679 | ATAGTTTTTATAGTAAAATGGGG | 10170 |
| hs132665908 | ACTGGCTAAAAGCATTTGAAAGG | 10171 |
| hs132665920 | TTTCTTACTACATCACCTGTCGG | 10172 |
| hs132665994 | ATATAATAGATACCATACTTAGG | 10173 |
| hs132665862 | TGCTTTCCCACACTCTCACTCGG | 10174 |
| hs132665750 | ATAATTTAGAATCCGAGTAGTGG | 10175 |
| hs132665607 | TGAAAGATACACATTTTACATGG | 10176 |
| hs132665749 | CATGTTTAGAAGCCACTACTCGG | 10177 |
| hs132665846 | AGTCAGTCATTCTAAAGTAGTGG | 10178 |
| hs132665995 | ACAATTGTGCAAGCTTGCTAAGG | 10179 |
| hs132665710 | GTATCAACAAAGAGGAACATAGG | 10180 |
| hs132665965 | TCGTATTTGTAAAAATACAATGG | 10181 |
| hs132665692 | TGAAAATCGCCATTTCTCCTGGG | 10182 |
| hs132665834 | TAGTTATTTCAGCATCCCTGTGG | 10183 |
| hs132665647 | GAGTTATCTTCTCCTATCAGAGG | 10184 |
| hs132665797 | AATCTGGATATACAGCTGAATGG | 10185 |
| hs132665762 | GAGGAACAGAGGTCTGAAAGAGG | 10186 |
| hs132665833 | AGTTATTTCAGCATCCCTGTGGG | 10187 |
| hs132665700 | ATGAACTTCTGTTTTCAGGTAGG | 10188 |
| hs132665887 | TCAAATCCCCTTGTGATCAAAGG | 10189 |
| hs132665825 | GAAAGCTTATGAAGAACTGCTGG | 10190 |
| hs132665726 | TTCCCATGTTTTCAAGACCAAGG | 10191 |
| hs132665636 | TTTCTCCTCTAAGATGCTCAGGG | 10192 |
| hs132665874 | AAAAAGTTGATTCTGAAAGAGGG | 10193 |
| hs132665802 | CCCAGAGATGAGCCTCAACCAGG | 10194 |
| hs132665769 | GTTAGAGAAGATACAGAAAGAGG | 10195 |
| hs132665927 | TTTACCTTGATGTTTCCCTCAGG | 10196 |
| hs132665704 | TTCTGTGAGTTAATGGGAGACGG | 10197 |
| hs132665648 | AGTTATCTTCTCCTATCAGAGGG | 10198 |
| hs132665943 | TAAGACAGCTTTGATCAGGCAGG | 10199 |
| hs132665727 | TCCCATGTTTTCAAGACCAAGGG | 10200 |
| hs132665686 | GAGCACATATTTCAGTTTGTCGG | 10201 |
| hs132665969 | TGAAAAGTAATTTTATCCATGGG | 10202 |
| hs132665984 | CCACATGTAAATACTGAGAAAGG | 10203 |
| hs132665741 | TTATGAACATGGCAATTTCGAGG | 10204 |
| hs132665807 | ATAGCCTCTTCCACTAAGGCAGG | 10205 |
| hs132665844 | GGAATTGTCTCTGTTAGGTGAGG | 10206 |
| hs132665979 | ATAAAACTTCCTATTTGTGAAGG | 10207 |
| hs132665867 | GTGTTTACTACCCAGAGTATAGG | 10208 |
| hs132665945 | ATTATTGATCTGATTCTCACAGG | 10209 |
| hs132665955 | TTTTTAGGCTGCTTGAAAAAGGG | 10210 |
| hs132665590 | GTAAAATACTGGAGTACAGATGG | 10211 |
| hs132665772 | TAAGTTACTCTTCAGTCAAAGGG | 10212 |
| hs132665845 | GAATTGTCTCTGTTAGGTGAGGG | 10213 |
| hs132665916 | GGTTATTTTAAACTCATGGCAGG | 10214 |
| hs132665938 | ATTTGCATTTTATCAATAGCGGG | 10215 |
| hs132665662 | TGTTGCTAGGGGTATTTCAATGG | 10216 |
| hs132665586 | AAGACTTCATTTACATCCACAGG | 10217 |
| hs132665875 | AACTTTTTACCAACTCCCGCTGG | 10218 |
| hs132665688 | TGATGAGAGTACCTTGTTCGTGG | 10219 |
| hs132665608 | GTATCTTTCAGCTAAGAGATAGG | 10220 |
| hs132665766 | AGAAAGAGGAGGCTTTTAAGAGG | 10221 |
| hs132665972 | ACAGGCAGAGTAAATAAAATGGG | 10222 |
| hs132665619 | TTTTACCTGCTAATTGGAAAGGG | 10223 |
| hs132666003 | GATTCTTCTGTGACTGACTAGGG | 10224 |
| hs132665558 | TGACAGAGTGAAACATCTTAAGG | 10225 |
| hs132665743 | GATAATATTGTCAAGGGCAGAGG | 10226 |
| hs132665780 | TTGGTTTGTGTGTTAGGCATGGG | 10227 |
| hs132665616 | AGGATCCCTTTCCAATTAGCAGG | 10228 |
| hs132665729 | GGTCTTGAAAACATGGGAAAGGG | 10229 |
| hs132665722 | GCACTTTAAGAGAGCATTGTGGG | 10230 |
| hs132665948 | TTGTTTGCTGTGATTTTTGAGGG | 10231 |
| hs132665898 | ATATTCTAGGACACAATCTTGGG | 10232 |
| hs132665991 | AATATCTTATAATATATGACAGG | 10233 |
| hs132665792 | CTAAAAGATGAAAACACAACCGG | 10234 |
| hs132665565 | ATACTTATTAGTAATTTCAATGG | 10235 |
| hs132665765 | TTAAGAGGTGCTAATAAAGAAGG | 10236 |
| hs132665674 | AATGGTCTCTGACAGTCTATAGG | 10237 |
| hs132665878 | TCTGGCTTTGGGCTCTTCCTCGG | 10238 |
| hs132665635 | AAGCACCCTGAGCATCTTAGAGG | 10239 |
| hs132665885 | CCCTCCCTATCAAGTCGTTATGG | 10240 |
| hs132665933 | TGAGAGTTCAGGTTGATAAAGGG | 10241 |
| hs132665576 | GTTCAAAATGTAACTCTTAAGGG | 10242 |
| hs132665940 | ATAGGTAACCACATGATAACAGG | 10243 |
| hs132665905 | ACAAGGAAAAAATTATGCTTAGG | 10244 |
| hs132665937 | ATAAAATGCAAATCGTTCATAGG | 10245 |
| hs132665837 | TATTTTCTCATTGAAGACTTTGG | 10246 |
| hs132665755 | AGAATTATAAATACTAAAATGGG | 10247 |
| hs132665950 | TTTCAAGTATACTTCTTTGAAGG | 10248 |
| hs132665784 | ACTTGAACGTGAAGTGGCTTTGG | 10249 |
| hs132665713 | CTATCTTGCAAAGTAAAAACTGG | 10250 |
| hs132665928 | ATTTCATGTCCCATTTTAGTAGG | 10251 |
| hs132665909 | TTAGCCAGTTAGCATATCATAGG | 10252 |
| hs132665659 | AGACATGCTCTGCTGTTGCTAGG | 10253 |
| hs132665561 | GTTGTAGCAAGTCATGAAAATGG | 10254 |
| hs132665895 | GAGCACATGGTAACGCAAATTGG | 10255 |
| hs132665819 | GTGAATGATGGGGAAAGTTTAGG | 10256 |
| hs132665673 | CATTCCTTGTGATATCTTGTTGG | 10257 |
| hs132665975 | CATGCATCTTTGTATATGATTGG | 10258 |
| hs132665877 | GATGACCATAACGACTTGATAGG | 10259 |
| hs132665854 | GCTGTTTTCGAGGGTAAAATTGG | 10260 |
| hs132665776 | TCTGCAGTTGCATTTAAGATAGG | 10261 |
| hs132665919 | CATCACCTGTCGGTTTATATAGG | 10262 |
| hs132665869 | GAGAAATTGGAAGCATTAACTGG | 10263 |
| hs132665684 | TATGTGCTCATTCTACTTAAAGG | 10264 |
| hs132665868 | ATAACAGAGATAGGAGAAATTGG | 10265 |
| hs132665663 | TCAATGGATATTATTCAAAAAGG | 10266 |
| hs132665912 | TTTTAGGCTTTCATTAAAAATGG | 10267 |
| hs132665911 | TTTTAATGAAAGCCTAAAAATGG | 10268 |
| hs132665634 | ATATAACATTTACCTTTTAATGG | 10269 |
| hs132665568 | TATTTCTGCTAAATTATTTATGG | 10270 |
| hs132665428 | AAGAATGTATGTGTCTTACGTGG | 10271 |
| hs132665421 | ACTTCTGAGGAAACTATACGTGG | 10272 |
| hs132665475 | GCAGATACCAGGGAACACTGGGG | 10273 |
| hs132665275 | CTGTTGTTGTGGGAAATGAGTGG | 10274 |
| hs132665500 | GTGATAATACAGTTTCTAGGGGG | 10275 |
| hs132665195 | AAAACATTTCAAAAAAAACGTGG | 10276 |
| hs132665200 | ATATGCTGCCTGCTCAACAAGGG | 10277 |
| hs132665114 | CATAATGCTACTCAGGATGGCGG | 10278 |
| hs132665473 | AGATACCAGGGAACACTGGGGGG | 10279 |
| hs132665124 | CTAAGTATAAAAGAAGTCCGTGG | 10280 |
| hs132665072 | GGAGTACCTACTATGTACCATGG | 10281 |
| hs132665185 | TCTCTTGTGTGAAAATTAGGGGG | 10282 |
| hs132665484 | AGTCGTTGAGGTAATAACGTTGG | 10283 |
| hs132665207 | ATTCTATTAGATACTGCCAGTGG | 10284 |
| hs132665240 | AATAAATATATTGCACCCAGAGG | 10285 |
| hs132665441 | AGCCCAAAAGTACAGTTGAGTGG | 10286 |
| hs132665248 | TGAAGTACTTGCATGGAAGGTGG | 10287 |
| hs132665144 | GTGAAACGTCAACATGAACCAGG | 10288 |
| hs132665289 | AATCAAACTGCCCAGTACTGAGG | 10289 |
| hs132665084 | AGATCTCTGTAGGTACATGAGGG | 10290 |
| hs132665176 | CATCTATAATAGCAAAAAGGGGG | 10291 |
| hs132665241 | TTATTCACAGACTATTTCAGGGG | 10292 |
| hs132665423 | GAGGAACAGCCATTTACATGAGG | 10293 |
| hs132665288 | GCATTATACTAAGTGTCATGTGG | 10294 |
| hs132665263 | ACCTGTGAAGACAAGTTCTGAGG | 10295 |
| hs132665362 | ACTTAATGAGGGCAAGTGAGAGG | 10296 |
| hs132665143 | AGCAGTTAGAAGTCCATGAAGGG | 10297 |
| hs132665530 | TTATTACAAAACAGGAATGACGG | 10298 |
| hs132665368 | TAAGCTTTGGATCATAACCCTGG | 10299 |
| hs132665121 | ATCTCATTAAAAATATATCAGGG | 10300 |
| hs132665474 | CAGATACCAGGGAACACTGGGGG | 10301 |
| hs132665098 | GTGCAAGTTAGCAAAACCACAGG | 10302 |
| hs132665298 | GCTACTCATTCATGATGAAGGGG | 10303 |
| hs132665127 | TATGTAGCTCCTGTAGGCCACGG | 10304 |
| hs132665479 | GCTAACTTTGGCAGATACCAGGG | 10305 |
| hs132665352 | ACTGATGCCTTTCATGACCAAGG | 10306 |
| hs132665284 | CCAAAAGGAAGAGCCTCTGTGGG | 10307 |
| hs132665166 | TATATTGCAACATTTTTTGGGGG | 10308 |
| hs132665123 | ATGTAAAAAGAATATATACATGG | 10309 |
| hs132665106 | AATAGAACATTAGACTATCAGGG | 10310 |
| hs132665077 | CCATACATAGCATGAAAGCATGG | 10311 |
| hs132665432 | TCCATAGCCTAAGCTTGGGAAGG | 10312 |
| hs132665076 | AAATGACATAGCATATTCCATGG | 10313 |
| hs132665399 | TGAAAGTACAAAATTTACCATGG | 10314 |
| hs132665268 | AAAAGTAATACCCCTAGTGAGGG | 10315 |
| hs132665457 | TTAATGGGGAAACAGAGCTATGG | 10316 |
| hs132665465 | TCTTTACTGGTAGAACAAAAGGG | 10317 |
| hs132665419 | ATGAGTGGTTTATACAAGAGTGG | 10318 |
| hs132665397 | ACCATGGTTACAATGTAGAAGGG | 10319 |
| hs132665129 | TTAGAATATGTAGCTCCTGTAGG | 10320 |
| hs132665053 | AAGCTCTGATGGGAGCTGGAAGG | 10321 |
| hs132665250 | GCAGTTCTGAAGTACTTGCATGG | 10322 |
| hs132665155 | TGTATGGTTGACCTTTCTCAGGG | 10323 |
| hs132665435 | GAATCTTCCTTCCCAAGCTTAGG | 10324 |
| hs132665395 | TCCCTTCTACATTGTAACCATGG | 10325 |
| hs132665066 | AACCCAGAAAACTTTATCAAGGG | 10326 |
| hs132665221 | TTCTCATTTTAATTGAAGAGAGG | 10327 |
| hs132665142 | AAGCAGTTAGAAGTCCATGAAGG | 10328 |
| hs132665311 | AGATTTTGTCAGATGGGTGAGGG | 10329 |
| hs132665051 | AAAGTGCTCAAAGCTCTGATGGG | 10330 |
| hs132665364 | GGAAACTGTTAACTTAATGAGGG | 10331 |
| hs132665074 | ACATAGTAGGTACTCCAGAATGG | 10332 |
| hs132665177 | CTATAATAGCAAAAAGGGGGAGG | 10333 |
| hs132665105 | ACATTAGACTATCAGGGCAGAGG | 10334 |
| hs132665445 | CCCTCTGAAATACACCTGAAGGG | 10335 |
| hs132665401 | TATGCTGAGAAGACAGGATAGGG | 10336 |
| hs132665402 | ATATGCTGAGAAGACAGGATAGG | 10337 |
| hs132665407 | GCTTCATAGACATTTAGAAACGG | 10338 |
| hs132665418 | TAGTGGCATAATAATATGAGTGG | 10339 |
| hs132665203 | CCTATAGGAAATGTCTCCACTGG | 10340 |
| hs132665302 | GTCTGTATACAAATGTGGCATGG | 10341 |
| hs132665332 | CCTTTCACCATAATTTCTAGAGG | 10342 |
| hs132665119 | AAATATATCAGGGAAGAAGGAGG | 10343 |
| hs132665184 | CTCTCTTGTGTGAAAATTAGGGG | 10344 |
| hs132665345 | TGGAGTTTTAGGACAACCTAGGG | 10345 |
| hs132665245 | AGTAATGATCCATTTCCTCTGGG | 10346 |
| hs132665507 | AACCAAATACAGTCAGTCATGGG | 10347 |
| hs132665495 | ATTTCTGATTAATTCAGTGTAGG | 10348 |
| hs132665151 | TCAATCCAGCATCAGTCTATCGG | 10349 |
| hs132665194 | ATCTCACATGATTATAAATGTGG | 10350 |
| hs132665216 | GCTTTAAAATACTTGGGCAGGGG | 10351 |
| hs132665350 | TGAAAGGCCTTGGTCATGAAAGG | 10352 |
| hs132665381 | AAAGAACTGGAACATCCATAAGG | 10353 |
| hs132665313 | GCAACCAGATTTTGTCAGATGGG | 10354 |
| hs132665283 | TCTGTGGGTGTGTGTGAGCACGG | 10355 |
| hs132665104 | CATTAGACTATCAGGGCAGAGGG | 10356 |
| hs132665431 | TATCTCCATAGCCTAAGCTTGGG | 10357 |
| hs132665491 | TGGTAAGTAAAACTACATGCAGG | 10358 |
| hs132665270 | AATTTATATTGCCCTCACTAGGG | 10359 |
| hs132665130 | TTGCTTCCTTAAGCATTAGGAGG | 10360 |
| hs132665394 | ATACTTTGCACCATCAAATGAGG | 10361 |
| hs132665260 | TTTTGCTGAACTTTAAGTGAGGG | 10362 |
| hs132665357 | GTAGCTGTGCATATTGAAAAGGG | 10363 |
| hs132665272 | TTGAAAATAAAAACGCAAAAGGG | 10364 |
| hs132665542 | TAGGGATTTGATAAACACATAGG | 10365 |
| hs132665297 | GGCTACTCATTCATGATGAAGGG | 10366 |
| hs132665370 | AAAATGTCTCTAGTAAAAAGAGG | 10367 |
| hs132665040 | CTTTCAGTCTGTGGGTTCAGGGG | 10368 |
| hs132665159 | AACTACAGTGAAGTACCAATAGG | 10369 |
| hs132665073 | TAGGTACTCCAGAATGGTAATGG | 10370 |
| hs132665161 | GCAGTATCCGTTAAAATCTAGGG | 10371 |
| hs132665412 | TTTAGAATGAAATTCCAAGATGG | 10372 |
| hs132665205 | CCAGTGGAGACATTTCCTATAGG | 10373 |
| hs132665526 | AGACTTCTTTTTTAAATGAGAGG | 10374 |
| hs132665116 | ATATTTTTAATGAGATACAATGG | 10375 |
| hs132665209 | CTTTTGGCTTCAGTGTACATTGG | 10376 |
| hs132665513 | GAATTTATGCCCCAAAATGCAGG | 10377 |
| hs132665463 | GGTCGAACTGATACGTCATTAGG | 10378 |
| hs132665430 | ATATCTCCATAGCCTAAGCTTGG | 10379 |
| hs132665305 | GCTAAAACTCTCATGATCACTGG | 10380 |
| hs132665315 | TGAATTATGTTATTTGAGGTGGG | 10381 |
| hs132665096 | AGAACGTCTCTAGAAACATAAGG | 10382 |
| hs132665082 | GCAACATCACGCTGTGCTATGGG | 10383 |
| hs132665154 | TCACTTTGTGTCCCTGAGAAAGG | 10384 |
| hs132665434 | TCCTTCCCAAGCTTAGGCTATGG | 10385 |
| hs132665525 | AAAAAGTTACTTAAAAGTAAAGG | 10386 |
| hs132665191 | TGACTAATATGGGATATAGAAGG | 10387 |
| hs132665038 | ATTATTTTTTTCTTTCTAGAGGG | 10388 |
| hs132665387 | GCCTGCTTTAAAACTATACATGG | 10389 |
| hs132665110 | TTGTGTTTCAAATGAATTGAGGG | 10390 |
| hs132665256 | TGTTTTGTGTTATTCTACCCTGG | 10391 |
| hs132665278 | GTCTCTTTCTTTCACACACATGG | 10392 |
| hs132665366 | ATCCAAAGCTTACATATTGACGG | 10393 |
| hs132665422 | GGAAACTATACGTGGTTAAGAGG | 10394 |
| hs132665087 | TGTTCTTTTGAGATCTCTGTAGG | 10395 |
| hs132665075 | CATATTCCATGGTACATAGTAGG | 10396 |
| hs132665504 | GAGTGAACAAGTTTAAGAACAGG | 10397 |
| hs132665396 | TAGAAGGGAACCTCATTTGATGG | 10398 |
| hs132665451 | TGTTCCTTGAACGACAAAAACGG | 10399 |
| hs132665145 | ACATGAACCAGGTATTAAACAGG | 10400 |
| hs132665348 | AATAATACACTGAAAGGCCTTGG | 10401 |
| hs132665503 | TTATTTAGATGTATGTTGCTTGG | 10402 |
| hs132665477 | TGGCAGATACCAGGGAACACTGG | 10403 |
| hs132665363 | TTAACAGTTTCCTGAGACCAGGG | 10404 |
| hs132665374 | TTATGTCAGCATTAATTGGTTGG | 10405 |
| hs132665543 | TGATTTAGATAATCTTCTTAGGG | 10406 |
| hs132665467 | ATTAACACAGTCAACCAAACAGG | 10407 |
| hs132665163 | ACGGATACTGCAGAGCCTATTGG | 10408 |
| hs132665164 | AACCTGTCCCTAGATTTTAACGG | 10409 |
| hs132665427 | TTTTCCTTTCTATACAAAAAGGG | 10410 |
| hs132665137 | ATCATAATACTTTTTTCAAACGG | 10411 |
| hs132665536 | TGAGTTCATTGGAAGAAAATGGG | 10412 |
| hs132665292 | CTTATTCCTTCCTCAGTACTGGG | 10413 |
| hs132665056 | ACATTTTTAATTTTAAAAATGGG | 10414 |
| hs132665149 | TTTTTTGCCTGTTTAATACCTGG | 10415 |
| hs132665043 | GATCATTTCTTTCAGTCTGTGGG | 10416 |
| hs132665089 | TAAAAGTTCGAAGAGTAGTTTGG | 10417 |
| hs132665329 | GATACTATAATTATGTAATAGGG | 10418 |
| hs132665342 | ATAAAAACAGACATATGTTTAGG | 10419 |
| hs132665458 | TTAAGTAGTCATCCTAGTTATGG | 10420 |
| hs132665202 | TCTAAACTATAAACTCCTATAGG | 10421 |
| hs132665408 | AGAAACGGACAGAAATCATTTGG | 10422 |
| hs132665095 | GGTAATATAATTTAGTTAAAGGG | 10423 |
| hs132665443 | AAAGGAGCTATTATGATTTAGGG | 10424 |
| hs132665238 | TCTAATGTGCTACAACAAAATGG | 10425 |
| hs132665049 | TCTTATGTCTTATTACTTGATGG | 10426 |
| hs132665385 | ATACATGGACGTTTTCCTTATGG | 10427 |
| hs132665353 | ATAATATTGCTAACTAATAATGG | 10428 |
| hs132665173 | CGACATCTATAATAGCAAAAAGG | 10429 |
| hs132665375 | GTTCTTATGTCAGCATTAATTGG | 10430 |
| hs132665158 | CTATAAGTTGATTTTCAATATGG | 10431 |
| hs132664985 | GGAGTACAGAGGAACCACACCGG | 10432 |
| hs132664986 | AAAATGTAGCTGGAGTACAGAGG | 10433 |
| hs132664984 | GGTTACTACACTATCCGGTGTGG | 10434 |
| hs132664909 | GAACAAATGGAGATCACCAGAGG | 10435 |
| hs132664872 | AAGGAGATACCATACTCTGGAGG | 10436 |
| hs132664830 | ACATCATTTTGATATAAGAGGGG | 10437 |
| hs132664948 | ATAGACATGGAAAGGTGACAAGG | 10438 |
| hs132664960 | TGAGCTATGTGCTTTTCGCGGGG | 10439 |
| hs132664824 | ATGGGTATGAATGCGTACAGTGG | 10440 |
| hs132664974 | AGGAGACAGTCAGATCCTCATGG | 10441 |
| hs132664903 | GGTTGAGGAAGTCATCCTAAGGG | 10442 |
| hs132664973 | TCCTCATGGTAAAAGCAGCATGG | 10443 |
| hs132665001 | CATTTTTTACAGGATACATGTGG | 10444 |
| hs132664900 | GGGTGATAAGGAGGTGACAACGG | 10445 |
| hs132664927 | TATGCATGAATGTACTGTGTAGG | 10446 |
| hs132664995 | ATGGAAATAGTTAGAAACACGGG | 10447 |
| hs132664820 | ACATATTGAACAAAGAGCCAAGG | 10448 |
| hs132664970 | GCCATGCTGCTTTTACCATGAGG | 10449 |
| hs132664895 | GGGTCTGAGAGAAAGAGTAAGGG | 10450 |
| hs132664933 | CCTCTGATTCACAGGAAAAGCGG | 10451 |
| hs132665007 | ACAGCGCTAATTGATTGTGTCGG | 10452 |
| hs132664996 | CATGGAAATAGTTAGAAACACGG | 10453 |
| hs132664836 | TGCCACTTTTTAAATTACGGTGG | 10454 |
| hs132664953 | TTAATACAAAAGGCAAGGAGTGG | 10455 |
| hs132664979 | GATCCTTTCTGGACTAAAAGGGG | 10456 |
| hs132664889 | GCTTAATATTATTCATACAAGGG | 10457 |
| hs132664907 | ATATATTAAATATTGTCTGGAGG | 10458 |
| hs132664958 | ATGAGAAACTGATTAGAGGATGG | 10459 |
| hs132664812 | TCTTATCAGATATTTGTGAAGGG | 10460 |
| hs132665006 | TGTCGGTTTGCGTAAGCATGAGG | 10461 |
| hs132664920 | AAATTTCCTGCTAGGAACAGTGG | 10462 |
| hs132664981 | GGGGTAAGAACTCTGATGCTGGG | 10463 |
| hs132664868 | AGAAAGTTGGTATATATCCATGG | 10464 |
| hs132664935 | CCGCTTTTCCTGTGAATCAGAGG | 10465 |
| hs132664854 | AGTAACTTTTGTATTAGGAGAGG | 10466 |
| hs132664874 | TAAAGAATAAACAGACTCAAAGG | 10467 |
| hs132664837 | AGCCACCGTAATTTAAAAAGTGG | 10468 |
| hs132664808 | CTTTCCATACTCTATGGCACAGG | 10469 |
| hs132664940 | CTTTTGGATAAAGAATACCTTGG | 10470 |
| hs132664994 | ACACGGGTCAACAACAAGCTTGG | 10471 |
| hs132664988 | TCAAATTATCGTAATTTGAGAGG | 10472 |
| hs132664910 | ATCAAGACCAAGATACTAGCAGG | 10473 |
| hs132664888 | GTTCTGCTGAGATTAGTGATAGG | 10474 |
| hs132664886 | TTAGCTCATATTCTAATGATCGG | 10475 |
| hs132664807 | TGGCACAGGATGAAGTCAACCGG | 10476 |
| hs132664867 | TCAAACCAGTGCTAGAAAGTTGG | 10477 |
| hs132664982 | TTACCCCTTTTAGTCCAGAAAGG | 10478 |
| hs132664869 | CTTTCTAGCACTGGTTTGAGAGG | 10479 |
| hs132664972 | CATGGTAAAAGCAGCATGGCCGG | 10480 |
| hs132664991 | AGGAAAATATTTAAAACTGATGG | 10481 |
| hs132664962 | TATGAGCTATGTGCTTTTCGCGG | 10482 |
| hs132664959 | GGGAATGAGAAACTGATTAGAGG | 10483 |
| hs132664870 | ATATACCAACTTTCTAGCACTGG | 10484 |
| hs132664928 | TATATCTGAATCTCAAGAATCGG | 10485 |
| hs132664831 | CACATCATTTTGATATAAGAGGG | 10486 |
| hs132664932 | GGATTATTCCTCTGATTCACAGG | 10487 |
| hs132664921 | ATATTTTTAAATTTCCTGCTAGG | 10488 |
| hs132664862 | TGACGATTCAATCGTTTTGGTGG | 10489 |
| hs132664899 | ACTCTTTCTCTCAGACCCATTGG | 10490 |
| hs132664898 | AAGAGTAAGGGGTGATAAGGAGG | 10491 |
| hs132664947 | TGACAAGGTTGATTTAGAAAAGG | 10492 |
| hs132664913 | TAGCAGGTCCCAGAAGTCATTGG | 10493 |
| hs132664969 | TTAAGGAATCCTCATAGAAATGG | 10494 |
| hs132664952 | TTGCATACTGTAAAAAAGAATGG | 10495 |
| hs132665015 | CCTATTGATTATGCTCCAAATGG | 10496 |
| hs132664823 | ACATAATTTAGAGCATTAATGGG | 10497 |
| hs132664841 | GATAATAACACTTTTAAAAAGGG | 10498 |
| hs132664990 | TCTCAAATTACGATAATTTGAGG | 10499 |
| hs132664957 | GGATGGACTAAAACGTTTCCAGG | 10500 |
| hs132665018 | CCATTTGGAGCATAATCAATAGG | 10501 |
| hs132664832 | GCACATCATTTTGATATAAGAGG | 10502 |
| hs132664880 | TTAGAGAGCCTTATCAGAATTGG | 10503 |
| hs132664871 | TTAGTTGGTCCTCCAGAGTATGG | 10504 |
| hs132664806 | TCATCCTGTGCCATAGAGTATGG | 10505 |
| hs132664864 | ATTAAAGACGTTTAGCAAAATGG | 10506 |
| hs132664848 | CATTTTCTCTTTCTTCTAATGGG | 10507 |

The application's sequence listing, which the Patent Office published only in electronic form, follows.

SEQUENCE LISTING (10552 sequences)

SEQ ID NO: 1 - RNA, 23 nt, synthetic construct
  source 1..23: mol_type = other RNA
agtggaagcgctgcaggtccagg

SEQ ID NO: 2 - RNA, 23 nt, synthetic construct
  source 1..23: mol_type = other RNA
cgccctgggcaacaatcgcgtgg

SEQ ID NO: 3 - RNA, 23 nt, synthetic construct
  source 1..23: mol_type = other RNA
ctggtgctcaacacgccgtaagg

SEQ ID NO: 4 - RNA, 23 nt, synthetic construct
  source 1..23: mol_type = other RNA
acggcgtgttgagcaccagtcgg

SEQ ID NO: 5-14 - skipped (10 entries)

SEQ ID NO: 15 - RNA, 23 nt, synthetic construct
  source 1..23: mol_type = other RNA
cattggctttgatttccctaggg

SEQ ID NO: 16 - RNA, 23 nt, synthetic construct
  source 1..23: mol_type = other RNA
acagttgcctaagaactggtggg

SEQ ID NO: 17 - DNA, 1447 bp, Homo sapiens
  source 1..1447: mol_type = genomic DNA
gagaggttatgtggctttaccaaggtcccagagttcctagggcagagaacaggattgtctaccagacattttaattctagtactatgcatcttaaccattaccataggctgacttactctacagtgtccaacactattcatattaagatttatttaatgactttgaaacagtatttcatgtctaaatagaaaaactactaactcgcatttttaagaaaatattgtatcttggtttttcttcactgctggccagtttactaacaatctgaaataaaaagaaaaaaatatgataaactgctcccagtataaaatacagagctaagacaagaacgtttcattggctttgatttccctagggtccagcttcaaattaatttacttcctattcaagggaattttaaatcagaaagaagatcttatcccatcttgttttgcctttgttttttcttgaataaaaaaaaaataagtaaaatttatttccctggcaaggtctgaaaacttttgttttctttaccacttccacaatgtatatgattgttactgagaaggcttatttaacttaagttacttgtccaggcatgagaatgagcaaaatcgttttttaaaaaattgttaaatgtatattaatgaaaaggttgaatcttttcattttctaccatgtattgctaaacaaagtatccacattgttagaaaaagatatataatgtcatgaataagagtttggctcaaattgttactcttcaattaaatttgacttattgttattgaaattggctctttagcttgtgtttctaatttttctttttcttcttttttcctttttgcaaaaacccaaaatattttagctcctactcagactgttactctggtgacacaacctgtggttactaaggaaactgccatctccaaactagaaatgccatcttccttgatgttggaggtacctgctctggcagatttcaaccgggcttggacagaacttaccgactggctttctctgcttgatcaagttataaaatcacagagggtgatggtgggtgaccttgaggatatcaacgagatgatcatcaagcagaaggtatgagaaaaaatgataaaagttggcagaagtttttctttaaaatgaagattttccaccaatcactttactctcctagaccatttcccaccagttcttaggcaactgtttctctctcagcaaacacattactctcactattcagcctaagtataatcaaggatataaattaatgcaaataacaaaagtagccatacattaaaaaggaaatatacaaaaaaaaaaaaaaaaaaaagcagaaaccttacaagaatagttgtctcagttaaatttactaaacaacctggtattttaaaaatctattttataccaaataagtcactcaactgagctatttacatttaaactgtttgttttggcactacgcag

SEQ ID NO: 18 - DNA, 22 bp, synthetic construct
  source 1..22: mol_type = other DNA
gagaggttatgtggctttacca

SEQ ID NO: 19 - DNA, 20 bp, synthetic construct
  source 1..20: mol_type = other DNA
ctgcgtagtgccaaaacaaa

SEQ ID NO: 20 - RNA, 23 nt, synthetic construct
  source 1..23: mol_type = other RNA
aaggccaaacctcggcttacctg

SEQ ID NO: 21 - RNA, 23 nt, synthetic construct
  source 1..23: mol_type = other RNA
aaagagcaataaaatggcttcaa

SEQ ID NO: 22 - RNA, 23 nt, synthetic construct
  source 1..23: mol_type = other RNA
aaggccaaacctcggcttacctg

SEQ ID NO: 23 - RNA, 21 nt, synthetic construct
  source 1..21: mol_type = other RNA
aaggccaaacctcggcttacc

SEQ ID NO: 24 - RNA, 25 nt, synthetic construct
  source 1..25: mol_type = other RNA
tttaaaggccaaacctcggcttacc

SEQ ID NO: 25 - DNA, 4260 bp, synthetic construct
  source 1..4260: mol_type = other DNA
gcggccgcggtccgactagttaattaaaaaaacaggtaagccgaggtttggccttatctacacttagtagaaattttcaggatgtagaccggccgccactataaggctcgaaagaggaataaatttttcgtttagggtgatttcccacaaagcacagcgcgtaatttgcatgcgctctaccccaggctcctgtgctagacaagaagcccgcgcatccgggcaagggatgatgacgtcgtccttcaagagcgccgccaccatggcccccaagaagaagaggaaagtgggaatccacggcgtgcctgccgccagcaagctggagaagtttacaaactgctactccctgtctaagaccctgcgcttcaaggccatccccgtgggcaagacccaggagaacatcgacaataagaggctgctggtggaggacgagaagagagccgaggattataagggcgtgaagaagctgctggataggtactatctgtcttttatcaacgacgtgctgcacagcatcaagctgaagaatctgaacaattacatcagcctgttcaggaagaagacaagaaccgagaaggagaataaggagctggagaacctggagatcaatctgagaaaggagatcgccaaggccttcaagggcaacgagggctacaagtccctgtttaagaaggatatcatcgagacaatcctgcctgagttcctggacgataaggacgagatcgccctggtgaacagcttcaatggctttaccacagccttcaccggcttctttgataacagagagaatatgttttccgaggaggccaagagcacatccatcgccttccggtgtatcaacgagaatctgacccgctacatctctaatatggacatcttcgagaaggtggacgccatctttgataagcacgaggtgcaggagatcaaggagaagatcctgaacagcgactatgatgtggaggatttctttgagggcgagttctttaactttgtgctgacacaggagggcatcgacgtgtacaatgccatcatcggcggcttcgtgaccgagagcggcgagaagatcaagggcctgaacgagtacatcaacctgtataatcagaagaccaagcagaagctgcctaagtttaagccactgtacaagcaggtgctgagcgatagggagtctctgagcttctacggcgagggctatacatccgatgaggaggtgctggaggtgtttagaaacaccctgaacaagaattccgagatcttcagctccatcaagaagctggagaagctgttcaagaattttgacgagtactctagcgccggcatctttgtgaagaacggccctgccatcagcacaatctccaaggatatcttcggcgagtggaacgtgatccgggacaagtggaatgccgagtatgacgatatccacctgaagaagaaggccgtggtgaccgagaagtacgaggacgataggagaaagtccttcaagaagatcggctccttttctctggagcagctgcaggagtacgccgacgccgatctgtctgtggtggagaagctgaaggagatcatcatccagaaggtggatgagatctacaaggtgtatggctcctctgagaagctgttcgacgccgattttgtgctggagaagagcctgaagaagaacgacgccgtggtggccatcatgaaggacctgctggattctgtgaagagcttcgagaattacatcaaggccttctttggcgagggcaaggagacaaaccgggacgagtccttctatggcgattttgtgctggcctacgacatcctgctgaaggtggaccacatctacgatgccatccgcaattatgtgacccagaagccatactctaaggataagttcaagctgtattttcagaacccccagttcatgggcggctgggacaaggataaggagacagactatagggccaccatcctgagatacggctccaagtactatctggccatcatggataagaagtacgccaagtgcctgcagaagatcgacaaggacgatgtgaacggcaattacgagaagatcaactataagctgctgcccggccctaataagatgctgcctaaggtgttcttttctaagaagtggatggcctactataacccaagcgaggacatccagaagatctacaagaatggcacattcaagaagggcgatatgtttaacctgaatgactgtcacaagctgatcgacttctttaaggatagcatctccaggtatcctaagtggtccaatgcctacgatttcaacttttctgagacagagaagtataaggacatcgccggcttttacagagaggtggaggagcagggctataaggtgagcttcgagtctgccagcaagaaggaggtggataagctggtggaggagggcaagctgtacatgttccagatctataacaaggacttttccgataagtctcacggcacaccaaatctgcacaccatgtacttcaagctgctgtttgacgagaacaatcacggccagatcaggctgagcggaggagcagagctgttcatgaggagggcctccctgaagaaggaggagctggtggtgcacccagcaaactcccctatcgccaacaagaatccagataatcccaagaagaccacaaccctgtcctacgacgtgtataaggataagaggttttctgaggaccagtacgagctgcacatcccaatcgccatcaataagtgccccaagaacatcttcaagatcaatacagaggtgagagtgctgctgaagcacgacgataacccatatgtgatcggcatcgatcggggcgagcgcaatctgctgtacatcgtggtggtggacggcaagggcaacatcgtggagcagtattccctgaacgagatcatcaacaacttcaacggcatccggatcaagacagattaccactctctgctggacaagaaggagaaggagcggttcgaggcccgccagaactggacctccatcgagaatatcaaggagctgaaggccggctatatctctcaggtggtgcacaagatctgcgagctggtggagaagtacgatgccgtgatcgccctggaggacctgaactctggctttaagaatagccgcgtgaaggtggagaagcaggtgtatcagaagttcgagaagatgctgatcgataagctgaactacatggtggacaagaagtctaatccatgtgcaacaggcggcgccctgaagggatatcagatcaccaataagttcgagagctttaagtccatgtctacccagaacggcttcatcttttacatccctgcctggctgacatccaagatcgacccatctaccggcttcgtgaacctgctgaagacaaagtataccagcatcgccgattccaagaagttcatcagctcctttgaccggatcatgtacgtgccagaggaggatctgttcgagtttgccctggactataagaacttctctcgcacagacgccgattacatcaagaagtggaagctgtacagctatggcaacaggatcagaatcttccggaatcccaagaagaacaacgtgttcgactgggaggaggtgtgcctgaccagcgcctataaggagctgttcaacaagtacggcatcaattatcagcagggcgatatccgcgccctgctgtgcgagcagtccgacaaggccttctactctagctttatggccctgatgagcctgatgctgcagatgcggaattccatcacaggccgcaccgacgtggattttctgatcagccccgtgaagaactccgacggcatcttctacgatagcaggaactatgaggcccaggagaatgccatcctgcctaagaacgccgacgccaatggcgcctataacatcgccagaaaggtgctgtgggccatcggccagttcaagaaggccgaggacgagaagctggataaggtgaagatcgccatctctaacaaggagtggctggagtacgcccagaccagcgtgaagcataaacgaccagccgcaactaaaaaggcagggcaggcaaagaagaagaaaggaagctaaccggtcagacatgataagatacattgatgagtttggacaaaccacaactagaatgcagtgaaaaaaatgctttatttgtgaaatttgtgatgctattgctttatttgtaaccattataagctgcaataaacaagttaacaacaacaattgcattcattttatgtttcaggttcagggggaggtgtgggaggttttttaaagctagcggccgc

SEQ ID NO: 26 - DNA, 4303 bp, synthetic construct
  source 1..4303: mol_type = other DNA
gcggccgcggtccgactagttaattaaaaaaacaggtaagccgaggtttggccttatctacacttagtagaaattttgaagccattttattgctctttatctacacttagtagaaattttcaggatgtagaccggccgccactataaggctcgaaagaggaataaatttttcgtttagggtgatttcccacaaagcacagcgcgtaatttgcatgcgctctaccccaggctcctgtgctagacaagaagcccgcgcatccgggcaagggatgatgacgtcgtccttcaagagcgccgccaccatggcccccaagaagaagaggaaagtgggaatccacggcgtgcctgccgccagcaagctggagaagtttacaaactgctactccctgtctaagaccctgcgcttcaaggccatccccgtgggcaagacccaggagaacatcgacaataagaggctgctggtggaggacgagaagagagccgaggattataagggcgtgaagaagctgctggataggtactatctgtcttttatcaacgacgtgctgcacagcatcaagctgaagaatctgaacaattacatcagcctgttcaggaagaagacaagaaccgagaaggagaataaggagctggagaacctggagatcaatctgagaaaggagatcgccaaggccttcaagggcaacgagggctacaagtccctgtttaagaaggatatcatcgagacaatcctgcctgagttcctggacgataaggacgagatcgccctggtgaacagcttcaatggctttaccacagccttcaccggcttctttgataacagagagaatatgttttccgaggaggccaagagcacatccatcgccttccggtgtatcaacgagaatctgacccgctacatctctaatatggacatcttcgagaaggtggacgccatctttgataagcacgaggtgcaggagatcaaggagaagatcctgaacagcgactatgatgtggaggatttctttgagggcgagttctttaactttgtgctgacacaggagggcatcgacgtgtacaatgccatcatcggcggcttcgtgaccgagagcggcgagaagatcaagggcctgaacgagtacatcaacctgtataatcagaagaccaagcagaagctgcctaagtttaagccactgtacaagcaggtgctgagcgatagggagtctctgagcttctacggcgagggctatacatccgatgaggaggtgctggaggtgtttagaaacaccctgaacaagaattccgagatcttcagctccatcaagaagctggagaagctgttcaagaattttgacgagtactctagcgccggcatctttgtgaagaacggccctgccatcagcacaatctccaaggatatcttcggcgagtggaacgtgatccgggacaagtggaatgccgagtatgacgatatccacctgaagaagaaggccgtggtgaccgagaagtacgaggacgataggagaaagtccttcaagaagatcggctccttttctctggagcagctgcaggagtacgccgacgccgatctgtctgtggtggagaagctgaaggagatcatcatccagaaggtggatgagatctacaaggtgtatggctcctctgagaagctgttcgacgccgattttgtgctggagaagagcctgaagaagaacgacgccgtggtggccatcatgaaggacctgctggattctgtgaagagcttcgagaattacatcaaggccttctttggcgagggcaaggagacaaaccgggacgagtccttctatggcgattttgtgctggcctacgacatcctgctgaaggtggaccacatctacgatgccatccgcaattatgtgacccagaagccatactctaaggataagttcaagctgtattttcagaacccccagttcatgggcggctgggacaaggataaggagacagactatagggccaccatcctgagatacggctccaagtactatctggccatcatggataagaagtacgccaagtgcctgcagaagatcgacaaggacgatgtgaacggcaattacgagaagatcaactataagctgctgcccggccctaataagatgctgcctaaggtgttcttttctaagaagtggatggcctactataacccaagcgaggacatccagaagatctacaagaatggcacattcaagaagggcgatatgtttaacctgaatgactgtcacaagctgatcgacttctttaaggatagcatctccaggtatcctaagtggtccaatgcctacgatttcaacttttctgagacagagaagtataaggacatcgccggcttttacagagaggtggaggagcagggctataaggtgagcttcgagtctgccagcaagaaggaggtggataagctggtggaggagggcaagctgtacatgttccagatctataacaaggacttttccgataagtctcacggcacaccaaatctgcacaccatgtacttcaagctgctgtttgacgagaacaatcacggccagatcaggctgagcggaggagcagagctgttcatgaggagggcctccctgaagaaggaggagctggtggtgcacccagcaaactcccctatcgccaacaagaatccagataatcccaagaagaccacaaccctgtcctacgacgtgtataaggataagaggttttctgaggaccagtacgagctgcacatcccaatcgccatcaataagtgccccaagaacatcttcaagatcaatacagaggtgagagtgctgctgaagcacgacgataacccatatgtgatcggcatcgatcggggcgagcgcaatctgctgtacatcgtggtggtggacggcaagggcaacatcgtggagcagtattccctgaacgagatcatcaacaacttcaacggcatccggatcaagacagattaccactctctgctggacaagaaggagaaggagcggttcgaggcccgccagaactggacctccatcgagaatatcaaggagctgaaggccggctatatctctcaggtggtgcacaagatctgcgagctggtggagaagtacgatgccgtgatcgccctggaggacctgaactctggctttaagaatagccgcgtgaaggtggagaagcaggtgtatcagaagttcgagaagatgctgatcgataagctgaactacatggtggacaagaagtctaatccatgtgcaacaggcggcgccctgaagggatatcagatcaccaataagttcgagagctttaagtccatgtctacccagaacggcttcatcttttacatccctgcctggctgacatccaagatcgacccatctaccggcttcgtgaacctgctgaagacaaagtataccagcatcgccgattccaagaagttcatcagctcctttgaccggatcatgtacgtgccagaggaggatctgttcgagtttgccctggactataagaacttctctcgcacagacgccgattacatcaagaagtggaagctgtacagctatggcaacaggatcagaatcttccggaatcccaagaagaacaacgtgttcgactgggaggaggtgtgcctgaccagcgcctataaggagctgttcaacaagtacggcatcaattatcagcagggcgatatccgcgccctgctgtgcgagcagtccgacaaggccttctactctagctttatggccctgatgagcctgatgctgcagatgcggaattccatcacaggccgcaccgacgtggattttctgatcagccccgtgaagaactccgacggcatcttctacgatagcaggaactatgaggcccaggagaatgccatcctgcctaagaacgccgacgccaatggcgcctataacatcgccagaaaggtgctgtgggccatcggccagttcaagaaggccgaggacgagaagctggataaggtgaagatcgccatctctaacaaggagtggctggagtacgcccagaccagcgtgaagcataaacgaccagccgcaactaaaaaggcagggcaggcaaagaagaagaaaggaagctaaccggtcagacatgataagatacattgatgagtttggacaaaccacaactagaatgcagtgaaaaaaatgctttatttgtgaaatttgtgatgctattgctttatttgtaaccattataagctgcaataaacaagttaacaacaacaattgcattcattttatgtttcaggttcagggggaggtgtgggaggttttttaaagctagcggccgc

SEQ ID NO: 27 - skipped

SEQ ID NO: 28 - DNA, 4345 bp, synthetic construct
  source 1..4345: mol_type = other DNA
gcggccgcggtccgactagttaattaaaaaaaggtaagccgaggtttggccttatctacaagagtagaaattaaaaaggtcttttgacttcaggatgtagaccggccgccactataaggctcgaaagaggaataaatttttcgtttagggtgatttcccacaaagcacagcgcgtaatttgcatgcgctctaccccaggctcctgtgctagacaagaagcccgcgcatccgggcaagggatgatgacgtcgtccttcaagagcgccgccaccatggcacccaagaagaaaagaaaggtcggaatccacggagtcccagcagctaacaatggaactaacaacttccagaacttcatcgggatcagctccctgcagaagaccctgaggaacgccctgatccccacagagacaacacagcagttcatcgtgaagaatggcatcatcaaggaggatgagctgaggggcgagaacagacagatcctgaaggacatcatggacgattactatagaggcttcatcagcgagacactgtctagcatcgacgatatcgactggacatccctgtttgagaagatggagatccagctgaagaatggcgataacaaggacaccctgatcaaggagcagacagagtacaggaaggccatccacaagaagttcgccaatgacgatagattcaagaacatgttttccgccaagctgatctctgacatcctgcctgagtttgtgatccacaacaataactatagcgcctccgagaaggaggagaagacccaggtcatcaagctgttcagccggtttgccacatccttcaaggactactttaagaatcgcgccaactgcttcagcgccgacgatatctcctctagctcctgtcaccggatcgtgaatgataacgccgagatcttcttttccaacgccctggtgtacaggagaatcgtgaagtctctgagcaatgacgatatcaacaagatctctggcgatatgaaggactctctgaaggagatgagcctggaggagatctacagctatgagaagtatggcgagttcatcacccaggagggcatctctttttacaacgacatctgcggcaaggtcaatagcttcatgaacctgtattgtcagaagaataaggagaataagaacctgtacaagctgcagaagctgcacaagcagatcctgtgcatcgccgatacaagctatgaggtgccatacaagttcgagtctgacgaggaggtgtaccagagcgtgaatggctttctggataacatctctagcaagcacatcgtggagaggctgagaaagatcggcgataattataacggctacaacctggacaagatctacatcgtgtccaagttctatgagtccgtgtctcagaagacctatcgcgactgggagacaatcaacacagccctggagatccactacaataacatcctgcccggcaacggcaagagcaaggccgataaggtgaagaaggccgtgaagaatgacctgcagaagtccatcaccgagatcaatgagctggtgagcaactataagctgtgctccgacgataacatcaaggccgagacatacatccacgagatcagccacatcctgaataacttcgaggcccaggagctgaagtataatcccgagatccacctggtggagtccgagctgaaggcctctgagctgaagaatgtgctggacgtgatcatgaacgccttccactggtgttccgtgtttatgaccgaggagctggtggacaaggataataacttttacgccgagctggaggagatctatgatgagatctaccctgtgatctccctgtacaatctggtgcggaactatgtgacccagaagccttactctacaaagaagatcaagctgaacttcggaatcccaaccctggccgacggatggagcaagtccaaggagtactctaataacgccatcatcctgatgcgcgataatctgtactatctgggcatctttaatgccaagaacaagcctgacaagaagatcatcgagggcaatacaagcgagaacaagggcgattataagaagatgatctacaatctgctgcccggccctaacaagatgatccccaaggtgttcctgtcctctaagaccggcgtggagacatataagcctagcgcctacatcctggagggctataagcagaacaagcacatcaagagctccaaggacttcgatatcaccttttgccacgatctgatcgactacttcaagaattgtatcgccatccacccagagtggaagaacttcggctttgatttctccgacacctctacatatgaggacatctccggcttttacagggaggtggagctgcagggctataagatcgattggacatacatctctgagaaggacatcgatctgctgcaggagaagggccagctgtacctgttccagatctataacaaggacttcagcaagaagagcaccggcaatgacaacctgcacacaatgtacctgaagaatctgttctccgaggagaacctgaaggacatcgtgctgaagctgaatggcgaggccgagatcttctttagaaagtctagcatcaagaatcctatcatccacaagaagggctctatcctggtgaacaggacctatgaggccgaggagaaggaccagttcggcaacatccagatcgtgagaaagaatatcccagagaacatctaccaggagctgtacaagtacttcaacgataagagcgacaaggagctgtccgatgaggccgccaagctgaagaatgtggtgggacaccacgaggcagcaaccaacatcgtgaaggattacaggtacacatacgacaagtacttcctgcacatgccaatcaccatcaatttcaaggccaacaagacaggctttatcaacgaccgcatcctgcagtatatcgccaaggagaaggatctgcacgtgatcggaatcgaccggggcgagcgcaatctgatctacgtgtctgtgatcgacacctgtggcaacatcgtggagcagaagagctttaatatcgtgaacggctatgattaccagatcaagctgaagcagcaggagggagcaaggcagatcgcacgcaaggagtggaaggagatcggcaagatcaaggagatcaaggagggctacctgagcctggtcatccacgagatctctaagatggtcatcaagtataacgccatcatcgctatggaggacctgagctatggcttcaagaagggccggtttaaggtggagcgccaggtgtatcagaagttcgagacaatgctgatcaataagctgaactacctggtgtttaaggacatctccatcaccgagaacggcggcctgctgaagggctatcagctgacatacatccctgataagctgaagaatgtgggccaccagtgcggctgtatcttctacgtgccagccgcctatacctccaagatcgaccccaccacaggctttgtgaacatctttaagttcaaggatctgacagtggacgccaagcgggagttcatcaagaagtttgattctatccgctatgacagcgagaagaacctgttttgcttcacctttgattacaataacttcatcacccagaatacagtgatgtccaagtcctcttggagcgtgtacacatacggcgtgaggatcaagcggcgcttcgtgaatggcagattttctaacgagagcgataccatcgacatcacaaaggatatggagaagaccctggagatgacagacatcaactggagggatggccacgacctgagacaggatatcatcgactacgagatcgtgcagcacatcttcgagatctttcggctgaccgtgcagatgcgcaactctctgagcgagctggaggacagggattatgacagactgatctccccagtgctgaatgagaataacatcttctacgattctgccaaggcaggcgacgcactgccaaaggatgcagacgcaaacggcgcctattgtatcgccctgaagggcctgtacgagatcaagcagatcacagagaactggaaggaggatggcaagtttagcagagacaagctgaagatctccaataaggactggttcgactttattcagaacaagaggtatctgcctaagaagaagaggaaggtgtaaccggtcagacatgataagatacattgatgagtttggacaaaccacaactagaatgcagtgaaaaaaatgctttatttgtgaaatttgtgatgctattgctttatttgtaaccattataagctgcaataaacaagttaacaacaacaattgcattcattttatgtttcaggttcagggggaggtgtgggaggttttttaaagctagcggccgc

SEQ ID NO: 29 - DNA, 23 bp, Homo sapiens
  source 1..23: mol_type = genomic DNA
tatgacaagagacatccatgggg

SEQ ID NO: 30 - DNA, 23 bp, Homo sapiens
  source 1..23: mol_type = genomic DNA
aaaatgtgtaagtagcactgtgg

SEQ ID NO: 31 - DNA, 23 bp, Homo sapiens
  source 1..23: mol_type = genomic DNA
atacttatattcaagcacagggg

SEQ ID NO: 32 - DNA, 23 bp, Homo sapiens
  source 1..23: mol_type = genomic DNA
taggaagattctatgcacagggg

SEQ ID NO: 33 - DNA, 23 bp, Homo sapiens
  source 1..23: mol_type = genomic DNA
aaagaacctaaagtacacagggg

SEQ ID NO: 34 - DNA, 23 bp, Homo sapiens
  source 1..23: mol_type = genomic DNA
catgtagattagcctcacagggg

SEQ ID NO: 35 - DNA, 23 bp, Homo sapiens
  source 1..23: mol_type = genomic DNA
attgagattagagcaacacgggg

SEQ ID NO: 36 - DNA, 23 bp, Homo sapiens
  source 1..23: mol_type = genomic DNA
tgcaactaaatatcacactgtgg

SEQ ID NO: 37 - DNA, 23 bp, Homo sapiens
  source 1..23: mol_type = genomic DNA
tcagatagtctactaccacgtgg

SEQ ID NO: 38 - DNA, 23 bp, Homo sapiens
  source 1..23: mol_type = genomic DNA
tgttatgaacagatgttacgtgg

SEQ ID NO: 39 - DNA, 23 bp, Homo sapiens
  source 1..23: mol_type = genomic DNA
cgggtggggaaagaaatatgcgg

SEQ ID NO: 40 - DNA, 23 bp, Homo sapiens
  source 1..23: mol_type = genomic DNA
tccaaaccagaatagcacagtgg

SEQ ID NO: 41 - DNA, 23 bp, Homo sapiens
  source 1..23: mol_type = genomic DNA
atgacaagagacatccatggggg

SEQ ID NO: 42 - DNA, 23 bp, Homo sapiens
  source 1..23: mol_type = genomic DNA
acacccagattaaggcatcgggg

SEQ ID NO: 43 - DNA, 23 bp, Homo sapiens
  source 1..23: mol_type = genomic DNA
ggatcaggaaggtctcactgtgg

SEQ ID NO: 44 - DNA, 23 bp, Homo sapiens
  source 1..23: mol_type = genomic DNA
gaagatgtcagggaaccctgggg

SEQ ID NO: 45 - DNA, 23 bp, Homo sapiens
  source 1..23: mol_type = genomic DNA
aagactattacaataaaacgggg

SEQ ID NO: 46 - DNA, 23 bp, Homo sapiens
  source 1..23: mol_type = genomic DNA
aagatctgggaacaactacgtgg

SEQ ID NO: 47 - DNA, 23 bp, Homo sapiens
  source 1..23: mol_type = genomic DNA
acaggaatctgggaacactgagg

SEQ ID NO: 48 - DNA, 23 bp, Homo sapiens
  source 1..23: mol_type = genomic DNA
tttctacaatctcatcactgtgg

SEQ ID NO: 49 - DNA, 23 bp, Homo sapiens
  source 1..23: mol_type = genomic DNA
gaccaccctaaaaatcaccaggg

SEQ ID NO: 50 - DNA, 23 bp, Homo sapiens
  source 1..23: mol_type = genomic DNA
atgctttctctaaaacacagagg

SEQ ID NO: 51 - DNA, 23 bp, Homo sapiens
  source 1..23: mol_type = genomic DNA
tcaattagtacaaagccatgggg

SEQ ID NO: 52 - DNA, 23 bp, Homo sapiens
  source 1..23: mol_type = genomic DNA
tatcgtaccgatgaaccctgagg

SEQ ID NO: 53 - DNA, 23 bp, Homo sapiens
  source 1..23: mol_type = genomic DNA
aaatagacacgattgctacgtgg

SEQ ID NO: 54 - DNA, 23 bp, Homo sapiens
  source 1..23: mol_type = genomic DNA
gtttcatgaataaagcccagagg

SEQ ID NO: 55 - DNA, 23 bp, Homo sapiens
  source 1..23: mol_type = genomic DNA
acagacaccccaaatcctggagg

SEQ ID NO: 56 - DNA, 23 bp, Homo sapiens
  source 1..23: mol_type = genomic DNA
gggtgatttcaaagccacagagg

SEQ ID NO: 57 - DNA, 23 bp, Homo sapiens
  source 1..23: mol_type = genomic DNA
gcacttggctggtaatacagggg

SEQ ID NO: 58 - DNA, 23 bp, Homo sapiens
  source 1..23: mol_type = genomic DNA
ttagtggtcagcttacaatgagg

SEQ ID NO: 59 - DNA, 23 bp, Homo sapiens
  source 1..23: mol_type = genomic DNA
cttgactcaattctcctgagcgg

SEQ ID NO: 60 - DNA, 23 bp, Homo sapiens
  source 1..23: mol_type = genomic DNA
cttacacatgacctccccagagg

SEQ ID NO: 61 - DNA, 23 bp, Homo sapiens
  source 1..23: mol_type = genomic DNA
aatcttaggagtaattaccacgg

SEQ ID NO: 62 - DNA, 23 bp, Homo sapiens
  source 1..23: mol_type = genomic DNA
ttgcattccaagaatcacagtgg

SEQ ID NO: 63 - DNA, 23 bp, Homo sapiens
  source 1..23: mol_type = genomic DNA
gtcatccaaatatatcccagggg

SEQ ID NO: 64 - DNA, 23 bp, Homo sapiens
  source 1..23: mol_type = genomic DNA
tgtaactggagacaagaaggggg

SEQ ID NO: 65 - DNA, 23 bp, Homo sapiens
  source 1..23: mol_type = genomic DNA
tcaaccaatatggatcactgtgg

SEQ ID NO: 66 - DNA, 23 bp, Homo sapiens
  source 1..23: mol_type = genomic DNA
ccaaactgataagtcctcagggg

SEQ ID NO: 67 - DNA, 23 bp, Homo sapiens
  source 1..23: mol_type = genomic DNA
aattgtccagtaaatccatgtgg

SEQ ID NO: 68 - DNA, 23 bp, Homo sapiens
  source 1..23: mol_type = genomic DNA
actgtataggaactacatggagg

SEQ ID NO: 69 - DNA, 23 bp, Homo sapiens
  source 1..23: mol_type = genomic DNA
aatcatactgaatatcactgagg

SEQ ID NO: 70 - DNA, 23 bp, Homo sapiens
  source 1..23: mol_type = genomic DNA
tttattttattctctctacgggg

SEQ ID NO: 71 - DNA, 23 bp, Homo sapiens
  source 1..23: mol_type = genomic DNA
actgggaagctcttccacagtgg

SEQ ID NO: 72 - DNA, 23 bp, Homo sapiens
  source 1..23: mol_type = genomic DNA
tagggaggaatcccacaatgggg

SEQ ID NO: 73 - DNA, 23 bp, Homo sapiens
  source 1..23: mol_type = genomic DNA
aatcccctacattctcagggagg

SEQ ID NO: 74 - DNA, 23 bp, Homo sapiens
  source 1..23: mol_type = genomic DNA
gaagtgcttgaagaggaacaggg

SEQ ID NO: 75 - DNA, 23 bp, Homo sapiens
  source 1..23: mol_type = genomic DNA
taaatgagagaagcccatggtgg

SEQ ID NO: 76 - DNA, 23 bp, Homo sapiens
  source 1..23: mol_type = genomic DNA
catcatctcctacttcactgggg

SEQ ID NO: 77 - DNA, 23 bp, Homo sapiens
  source 1..23: mol_type = genomic DNA
cagactcttaagcagcagtgggg

SEQ ID NO: 78 - DNA, 23 bp, Homo sapiens
  source 1..23: mol_type = genomic DNA
gaatgaaaacaaacccaccgtgg

SEQ ID NO: 79 - DNA, 23 bp, Homo sapiens
  source 1..23: mol_type = genomic DNA
cagacattcaaaattctgggtgg

SEQ ID NO: 80 - DNA, 23 bp, Homo sapiens
  source 1..23: mol_type = genomic DNA
tcttctgtgactatgcagggtgg

SEQ ID NO: 81 - DNA, 23 bp, Homo sapiens
  source 1..23: mol_type = genomic DNA
aaagtgaaagagcctcctcgagg

SEQ ID NO: 82 - DNA, 23 bp, Homo sapiens
  source 1..23: mol_type = genomic DNA
gagataaagagaaagattggggg

SEQ ID NO: 83 - DNA, 23 bp, Homo sapiens
  source 1..23: mol_type = genomic DNA
gtgtaaagaacactacaacacgg

SEQ ID NO: 84 - DNA, 23 bp, Homo sapiens
  source 1..23: mol_type = genomic DNA
tgactaaacactgagccatgagg

SEQ ID NO: 85 - DNA, 23 bp, Homo sapiens
  source 1..23: mol_type = genomic DNA
tctattggcaatgtacactgagg

SEQ ID NO: 86 - DNA, 23 bp, Homo sapiens
  source 1..23: mol_type = genomic DNA
cagagatgtgacatccaatgtgg

SEQ ID NO: 87 - DNA, 23 bp, Homo sapiens
  source 1..23: mol_type = genomic DNA
ataatagacatgaaacaacaagg

SEQ ID NO: 88 - DNA, 23 bp, Homo sapiens
  source 1..23: mol_type = genomic DNA
ataagcgggtagcagtcctgcgg

SEQ ID NO: 89 - DNA, 23 bp, Homo sapiens
  source 1..23: mol_type = genomic DNA
ataaatatgatgatcccaggagg

SEQ ID NO: 90 - DNA, 23 bp, Homo sapiens
  source 1..23: mol_type = genomic DNA
ctacaggactcagatctgggagg

SEQ ID NO: 91 - DNA, 23 bp, Homo sapiens
  source 1..23: mol_type = genomic DNA
tctaggctagagtaaagctgtgg

SEQ ID NO: 92 - DNA, 23 bp, Homo sapiens
  source 1..23: mol_type = genomic DNA
aattgcgtatggcttcatgtggg

SEQ ID NO: 93 - DNA, 23 bp, Homo sapiens
  source 1..23: mol_type = genomic DNA
gatcaagatcaagaccggtgtgg

SEQ ID NO: 94 - DNA, 23 bp, Homo sapiens
  source 1..23: mol_type = genomic DNA
tcaccacagcaaccccagggagg

SEQ ID NO: 95 - DNA, 23 bp, Homo sapiens
  source 1..23: mol_type = genomic DNA
agtatgtgacgtcaattgagtgg

SEQ ID NO: 96 - DNA, 23 bp, Homo sapiens
  source 1..23: mol_type = genomic DNA
agcagtcctcagtaactcagggg

SEQ ID NO: 97 - DNA, 23 bp, Homo sapiens
  source 1..23: mol_type = genomic DNA
actctgggacatgaatctagagg

SEQ ID NO: 98 - DNA, 23 bp, Homo sapiens
  source 1..23: mol_type = genomic DNA
ctgttaccagtacagtacagtgg

SEQ ID NO: 99 - DNA, 23 bp, Homo sapiens
  source 1..23: mol_type = genomic DNA
cctgggaagtcaatgtacagtgg

SEQ ID NO: 100 - DNA, 23 bp, Homo sapiens
  source 1..23: mol_type = genomic DNA
tgtgtgttaggcctggactgagg

SEQ ID NO: 101 - DNA, 23 bp, Homo sapiens
  source 1..23: mol_type = genomic DNA
atgttaagccctcagcatcgagg

SEQ ID NO: 102 - DNA, 23 bp, Homo sapiens
  source 1..23: mol_type = genomic DNA
gtaagagaaaagtaccaacaggg

SEQ ID NO: 103 - DNA, 23 bp, Homo sapiens
  source 1..23: mol_type = genomic DNA
catttcttgagaaatccttgggg

SEQ ID NO: 104 - DNA, 23 bp, Homo sapiens
  source 1..23: mol_type = genomic DNA
agaacaataacactaccacccgg

SEQ ID NO: 105 - DNA, 23 bp, Homo sapiens
  source 1..23: mol_type = genomic DNA
actgtggtttaaatgcagtgagg

SEQ ID NO: 106 - DNA, 23 bp, Homo sapiens
  source 1..23: mol_type = genomic DNA
ttaccagtacagtacagtggtgg

SEQ ID NO: 107 - DNA, 23 bp, Homo sapiens
  source 1..23: mol_type = genomic DNA
tagagctgtgtgaatccatgggg

SEQ ID NO: 108 - DNA, 23 bp, Homo sapiens
  source 1..23: mol_type = genomic DNA
cgattaggtcacaaccaatgggg

SEQ ID NO: 109 - DNA, 23 bp, Homo sapiens
  source 1..23: mol_type = genomic DNA
agtggacttaggaaggtacaggg

SEQ ID NO: 110 - DNA, 23 bp, Homo sapiens
  source 1..23: mol_type = genomic DNA
gtggaaataatggtagatgtggg

SEQ ID NO: 111 - DNA, 23 bp, Homo sapiens
  source 1..23: mol_type = genomic DNA
tccaaacagacagaaataggtgg

SEQ ID NO: 112 - DNA, 23 bp, Homo sapiens
  source 1..23: mol_type = genomic DNA
atatctactgtgaaatactgtgg

SEQ ID NO: 113 - DNA, 23 bp, Homo sapiens
  source 1..23: mol_type = genomic DNA
gggtacctgagggatctgtgagg

SEQ ID NO: 114 - DNA, 23 bp, Homo sapiens
  source 1..23: mol_type = genomic DNA
gaggtattgaaggaatccagcgg

SEQ ID NO: 115 - DNA, 23 bp, Homo sapiens
  source 1..23: mol_type = genomic DNA
tcttaaatgagagaagcccatgg

SEQ ID NO: 116 - DNA, 23 bp, Homo sapiens
  source 1..23: mol_type = genomic DNA
aacagtattagagaaaaccaggg

SEQ ID NO: 117 - DNA, 23 bp, Homo sapiens
  source 1..23: mol_type = genomic DNA
gtgccatagagcactcttggggg

SEQ ID NO: 118 - DNA, 23 bp, Homo sapiens
  source 1..23: mol_type = genomic DNA
cttggctggatatcgaacagtgg

SEQ ID NO: 119 - DNA, 23 bp, Homo sapiens
  source 1..23: mol_type = genomic DNA
ttcatacacactcatcatggggg

SEQ ID NO: 120 - DNA, 23 bp, Homo sapiens
  source 1..23: mol_type = genomic DNA
tgtggtttaaatgcagtgagggg

SEQ ID NO: 121 - DNA, 23 bp, Homo sapiens
  source 1..23: mol_type = genomic DNA
gtataacaaagaaataaccgtgg

SEQ ID NO: 122 - DNA, 23 bp, Homo sapiens
  source 1..23: mol_type = genomic DNA
cagggtcaacaagctaacagtgg

SEQ ID NO: 123 - DNA, 23 bp, Homo sapiens
  source 1..23: mol_type = genomic DNA
accacaaacagcactccacgtgg

SEQ ID NO: 124 - DNA, 23 bp, Homo sapiens
  source 1..23: mol_type = genomic DNA
gacatccaatgtggtctgtgggg

SEQ ID NO: 125 - DNA, 23 bp, Homo sapiens
  source 1..23: mol_type = genomic DNA
tgtgtgcaaaggtaacaaagagg

SEQ ID NO: 126 - DNA, 23 bp, Homo sapiens
  source 1..23: mol_type = genomic DNA
aaatggccctatgcagacaaggg

SEQ ID NO: 127 - DNA, 23 bp, Homo sapiens
  source 1..23: mol_type = genomic DNA
ttagtaacaacctagtaacacgg

SEQ ID NO: 128 - DNA, 23 bp, Homo sapiens
  source 1..23: mol_type = genomic DNA
ggatcagaattgaaactgagggg

SEQ ID NO: 129 - DNA, 23 bp, Homo sapiens
  source 1..23: mol_type = genomic DNA
gatgaattcaacacacccggagg

SEQ ID NO: 130 - DNA, 23 bp, Homo sapiens
  source 1..23: mol_type = genomic DNA
atgaatagtgaccatgtgagtgg

SEQ ID NO: 131 - DNA, 23 bp, Homo sapiens
  source 1..23: mol_type = genomic DNA
ggttgagtgtttatgcacagagg

SEQ ID NO: 132 - DNA, 23 bp, Homo sapiens
  source 1..23: mol_type = genomic DNA
gcaagaaagatacagtctagggg

SEQ ID NO: 133 - DNA, 23 bp, Homo sapiens
  source 1..23: mol_type = genomic DNA
actctgtctctgtaatactgagg

SEQ ID NO: 134 - DNA, 23 bp, Homo sapiens
  source 1..23: mol_type = genomic DNA
taagccacaagtgtaatgggggg

SEQ ID NO: 135 - DNA, 23 bp, Homo sapiens
  source 1..23: mol_type = genomic DNA
aaagcttaaagctaacggagggg

SEQ ID NO: 136 - DNA, 23 bp, Homo sapiens
  source 1..23: mol_type = genomic DNA
gaatacgtaattgaaaaccatgg

SEQ ID NO: 137 - DNA, 23 bp, Homo sapiens
  source 1..23: mol_type = genomic DNA
gggtaacaaagttaaaaccaagg

SEQ ID NO: 138 - DNA, 23 bp, Homo sapiens
  source 1..23: mol_type = genomic DNA
gtacataaactaccaatgggagg

SEQ ID NO: 139 - DNA, 23 bp, Homo sapiens
  source 1..23: mol_type = genomic DNA
gttgaaaccacatgttgtggagg

SEQ ID NO: 140 - DNA, 23 bp, Homo sapiens
  source 1..23: mol_type = genomic DNA
cttcaggtagatgatgacagggg

SEQ ID NO: 141 - DNA, 23 bp, Homo sapiens
  source 1..23: mol_type = genomic DNA
actacttgaacacaccgcagtgg

SEQ ID NO: 142 - DNA, 23 bp, Homo sapiens
  source 1..23: mol_type = genomic DNA
tgggacccgcctgttcagagggg

SEQ ID NO: 143 - DNA, 23 bp, Homo sapiens
  source 1..23: mol_type = genomic DNA
agaccctacactatgcaagtggg

SEQ ID NO: 144 - DNA, 23 bp, Homo sapiens
  source 1..23: mol_type = genomic DNA
gattgagggtagaatgacaaggg

SEQ ID NO: 145 - DNA, 23 bp, Homo sapiens
  source 1..23: mol_type = genomic DNA
acactcactcaatatcatagggg

SEQ ID NO: 146 - DNA, 23 bp, Homo sapiens
  source 1..23: mol_type = genomic DNA
gaatggcatagagcccccaacgg

SEQ ID NO: 147 - DNA, 23 bp, Homo sapiens
  source 1..23: mol_type = genomic DNA
tgctacctatatattcccagtgg

SEQ ID NO: 148 - DNA, 23 bp, Homo sapiens
  source 1..23: mol_type = genomic DNA
aatgagatagggattcaacaagg

SEQ ID NO: 149 - DNA, 23 bp, Homo sapiens
  source 1..23: mol_type = genomic DNA
atttgggtcaaagagaagggagg

SEQ ID NO: 150 - DNA, 23 bp, Homo sapiens
  source 1..23: mol_type = genomic DNA
tggtcttgtagacttacccgagg

SEQ ID NO: 151 - DNA, 23 bp, Homo sapiens
  source 1..23: mol_type = genomic DNA
attgtggccagctcccagggtgg

SEQ ID NO: 152 - DNA, 23 bp, Homo sapiens
  source 1..23: mol_type = genomic DNA
tttcagctagaaatgagctgtgg

SEQ ID NO: 153 - DNA, 23 bp, Homo sapiens
  source 1..23: mol_type = genomic DNA
atggtcatcccatagtaccaagg

SEQ ID NO: 154 - DNA, 23 bp, Homo sapiens
  source 1..23: mol_type = genomic DNA
ttatgaatgatattcaaccacgg

SEQ ID NO: 155 - DNA, 23 bp, Homo sapiens
  source 1..23: mol_type = genomic DNA
gcactgcagagttccagcagagg

SEQ ID NO: 156 - DNA, 23 bp, Homo sapiens
  source 1..23: mol_type = genomic DNA
agctataagtgatttaacagggg

SEQ ID NO: 157 - DNA, 23 bp, Homo sapiens
  source 1..23: mol_type = genomic DNA
tatggcaaactaaagaaaggggg

SEQ ID NO: 158 - DNA, 23 bp, Homo sapiens
  source 1..23: mol_type = genomic DNA
ggactttgatgaggaccatgcgg

SEQ ID NO: 159 - DNA, 23 bp, Homo sapiens
  source 1..23: mol_type = genomic DNA
cacaaagtttgaacacatcgagg

SEQ ID NO: 160 - DNA, 23 bp, Homo sapiens
  source 1..23: mol_type = genomic DNA
cggatgctggccataaacagggg

SEQ ID NO: 161 - DNA, 23 bp, Homo sapiens
  source 1..23: mol_type = genomic DNA
aatttgaagaataagaacagagg

SEQ ID NO: 162 - DNA, 23 bp, Homo sapiens
  source 1..23: mol_type = genomic DNA
ttgagataccaaaataaacaggg

SEQ ID NO: 163 - DNA, 23 bp, Homo sapiens
  source 1..23: mol_type = genomic DNA
acgaaagcatggtagtttggggg

SEQ ID NO: 164 - DNA, 23 bp, Homo sapiens
  source 1..23: mol_type = genomic DNA
atatagtaagaaaccctgagagg

SEQ ID NO: 165 - DNA, 23 bp, Homo sapiens
  source 1..23: mol_type = genomic DNA
ttatcctaaagcaatagacaagg

SEQ ID NO: 166 - DNA, 23 bp, Homo sapiens
  source 1..23: mol_type = genomic DNA
tcagccggggagcaaaaccaggg

SEQ ID NO: 167 - DNA, 23 bp, Homo sapiens
  source 1..23: mol_type = genomic DNA
agaatgatctgtaatctctgagg

SEQ ID NO: 168 - DNA, 23 bp, Homo sapiens
  source 1..23: mol_type = genomic DNA
agaattgcatagttatgacaagg

SEQ ID NO: 169 - DNA, 23 bp, Homo sapiens
  source 1..23: mol_type = genomic DNA
aaaacagcattggttccaagtgg

SEQ ID NO: 170 - DNA, 23 bp, Homo sapiens
  source 1..23: mol_type = genomic DNA
aatctaggcagctattccagggg

SEQ ID NO: 171 - DNA, 23 bp, Homo sapiens
  source 1..23: mol_type = genomic DNA
aaataagtagtaaacaaaggggg

SEQ ID NO: 172 - DNA, 23 bp, Homo sapiens
  source 1..23: mol_type = genomic DNA
accttacagtgcaagcagggagg

SEQ ID NO: 173 - DNA, 23 bp, Homo sapiens
  source 1..23: mol_type = genomic DNA
agatgattacaaacaaaccaggg

SEQ ID NO: 174 - DNA, 23 bp, Homo sapiens
  source 1..23: mol_type = genomic DNA
tcactaccaggaccttagtgagg

SEQ ID NO: 175 - DNA, 23 bp, Homo sapiens
  source 1..23: mol_type = genomic DNA
atagctattaggtctatgtgagg

SEQ ID NO: 176 - DNA, 23 bp, Homo sapiens
  source 1..23: mol_type = genomic DNA
gtggtgagcaagaacagttgagg

SEQ ID NO: 177 - DNA, 23 bp, Homo sapiens
  source 1..23: mol_type = genomic DNA
ccaacggtaccagcaatgtgggg

SEQ ID NO: 178 - DNA, 23 bp, Homo sapiens
  source 1..23: mol_type = genomic DNA
atttcaaacagaaaccagcaggg

SEQ ID NO: 179 - DNA, 23 bp, Homo sapiens
  source 1..23: mol_type = genomic DNA
taaacactgagccatgaggtggg

SEQ ID NO: 180 - DNA, 23 bp, Homo sapiens
  source 1..23: mol_type = genomic DNA
ttgtcaatgggtatgatacgtgg

SEQ ID NO: 181 - DNA, 23 bp, Homo sapiens
  source 1..23: mol_type = genomic DNA
ggctggcttgaaaatcaggaggg

SEQ ID NO: 182 - DNA, 23 bp, Homo sapiens
  source 1..23: mol_type = genomic DNA
tctctatggtaacagacacaagg

SEQ ID NO: 183 - DNA, 23 bp, Homo sapiens
  source 1..23: mol_type = genomic DNA
tgactgtttaggagacacacagg

SEQ ID NO: 184 - DNA, 23 bp, Homo sapiens
  source 1..23: mol_type = genomic DNA
ataacagcaagggatagggaagg

SEQ ID NO: 185 - DNA, 23 bp, Homo sapiens
  source 1..23: mol_type = genomic DNA
ccatattttatagagaacagtgg

SEQ ID NO: 186 - DNA, 23 bp, Homo sapiens
  source 1..23: mol_type = genomic DNA
attcaatcacctatacaatgtgg

SEQ ID NO: 187 - DNA, 23 bp, Homo sapiens
  source 1..23: mol_type = genomic DNA
ggaagattgagtgaatacactgg

SEQ ID NO: 188 - DNA, 23 bp, Homo sapiens
  source 1..23: mol_type = genomic DNA
atggggtatggtaaacctggagg

SEQ ID NO: 189 - DNA, 23 bp, Homo sapiens
  source 1..23: mol_type = genomic DNA
tttcgcatagacatctgaggagg

SEQ ID NO: 190 - DNA, 23 bp, Homo sapiens
  source 1..23: mol_type = genomic DNA
ggaggccttatcaaacaccaggg

SEQ ID NO: 191 - DNA, 23 bp, Homo sapiens
  source 1..23: mol_type = genomic DNA
cctggaatttgaaatatccgggg

SEQ ID NO: 192 - DNA, 23 bp, Homo sapiens
  source 1..23: mol_type = genomic DNA
aaaacctcagtatgaaaacgggg

SEQ ID NO: 193 - DNA, 23 bp, Homo sapiens
  source 1..23: mol_type = genomic DNA
aagtgattgaaggatgacaaagg

SEQ ID NO: 194 - DNA, 23 bp, Homo sapiens
  source 1..23: mol_type = genomic DNA
ggtaaccacaaagtaccagaggg

SEQ ID NO: 195 - DNA, 23 bp, Homo sapiens
  source 1..23: mol_type = genomic DNA
gaagcctgatggagattaggtgg

SEQ ID NO: 196 - DNA, 23 bp, Homo sapiens
  source 1..23: mol_type = genomic DNA
ttgctaatactgatgacaagtgg

SEQ ID NO: 197 - DNA, 23 bp, Homo sapiens
  source 1..23: mol_type = genomic DNA
gatgtggtataaaaattgtgagg

SEQ ID NO: 198 - DNA, 23 bp, Homo sapiens
  source 1..23: mol_type = genomic DNA
acgaaaggcattatggtaggggg

SEQ ID NO: 199 - DNA, 23 bp, Homo sapiens
  source 1..23: mol_type = genomic DNA
tgatccctgaaatccagcagtgg

SEQ ID NO: 200 - DNA, 23 bp, Homo sapiens
  source 1..23: mol_type = genomic DNA
ggagatggcgctaatctgggagg

SEQ ID NO: 201 - DNA, 23 bp, Homo sapiens
  source 1..23: mol_type = genomic DNA
tctagggtgaaattacacgctgg

SEQ ID NO: 202 - DNA, 23 bp, Homo sapiens
  source 1..23: mol_type = genomic DNA
acaagaactaaatttgccagggg

SEQ ID NO: 203 - DNA, 23 bp, Homo sapiens
  source 1..23: mol_type = genomic DNA
aaggaaataaaagtatggcgggg

SEQ ID NO: 204 - DNA, 23 bp, Homo sapiens
  source 1..23: mol_type = genomic DNA
tgatatccagcatagatgggggg

SEQ ID NO: 205 - DNA, 23 bp, Homo sapiens
  source 1..23: mol_type = genomic DNA
tctacattatggaaactcagagg

SEQ ID NO: 206 - DNA, 23 bp, Homo sapiens
  source 1..23: mol_type = genomic DNA
tgaagagataaaaacaagcgggg

SEQ ID NO: 207 - DNA, 23 bp, Homo sapiens
  source 1..23: mol_type = genomic DNA
gaaagccattcacctcgaggagg

SEQ ID NO: 208 - DNA, 23 bp, Homo sapiens
  source 1..23: mol_type = genomic DNA
aggccctcaaatcttcctggagg

SEQ ID NO: 209 - DNA, 23 bp, Homo sapiens
  source 1..23: mol_type = genomic DNA
gaaaacttaggaatttactgtgg

SEQ ID NO: 210 - DNA, 23 bp, Homo sapiens
  source 1..23: mol_type = genomic DNA
attttcctagcatatctctgagg

SEQ ID NO: 211 - DNA, 23 bp, Homo sapiens
  source 1..23: mol_type = genomic DNA
ataattgagaattagtgcagggg

SEQ ID NO: 212 - DNA, 23 bp, Homo sapiens
  source 1..23: mol_type = genomic DNA
cagggggaaaaaaatcttcgggg

SEQ ID NO: 213 - DNA, 23 bp, Homo sapiens
  source 1..23: mol_type = genomic DNA
ggagaaaaaagtactcacaaggg

SEQ ID NO: 214 - DNA, 23 bp, Homo sapiens
  source 1..23: mol_type = genomic DNA
gcttatattagccaaagcagagg

SEQ ID NO: 215 - DNA, 23 bp, Homo sapiens
  source 1..23: mol_type = genomic DNA
agcatgcttcttcaccactgtgg

SEQ ID NO: 216 - DNA, 23 bp, Homo sapiens
  source 1..23: mol_type = genomic DNA
acacatagatagaactcacacgg

SEQ ID NO: 217 - DNA, 23 bp, Homo sapiens
  source 1..23: mol_type = genomic DNA
aaattgagattagagcaacacgg

SEQ ID NO: 218 - DNA, 23 bp, Homo sapiens
  source 1..23: mol_type = genomic DNA
gaacatggcagttataacacagg

SEQ ID NO: 219 - DNA, 23 bp, Homo sapiens
  source 1..23: mol_type = genomic DNA
atatcagggctattgagcagggg

SEQ ID NO: 220 - DNA, 23 bp, Homo sapiens
  source 1..23: mol_type = genomic DNA
cccccagttaaaatgaacagtgg

SEQ ID NO: 221 - DNA, 23 bp, Homo sapiens
  source 1..23: mol_type = genomic DNA
tatttattgttccgactcagggg

SEQ ID NO: 222 - DNA, 23 bp, Homo sapiens
  source 1..23: mol_type = genomic DNA
agttactctcccattcgaagggg

SEQ ID NO: 223 - DNA, 23 bp, Homo sapiens
  source 1..23: mol_type = genomic DNA
cattgctgtaacacagacaaggg

SEQ ID NO: 224 - DNA, 23 bp, Homo sapiens
  source 1..23: mol_type = genomic DNA
tctggatcagcattcaacaaagg

SEQ ID NO: 225 - DNA, 23 bp, Homo sapiens
  source 1..23: mol_type = genomic DNA
agtcctccctgagaatgtagggg

SEQ ID NO: 226 - DNA, 23 bp, Homo sapiens
  source 1..23: mol_type = genomic DNA
tgtgacgacgatcattggtgggg

SEQ ID NO: 227 - DNA, 23 bp, Homo sapiens
  source 1..23: mol_type = genomic DNA
tactcgatcctacaagtgcgtgg

SEQ ID NO: 228 - DNA, 23 bp, Homo sapiens
  source 1..23: mol_type = genomic DNA
agatgatgaagtttggacaatgg

SEQ ID NO: 229 - DNA, 23 bp, Homo sapiens
  source 1..23: mol_type = genomic DNA
gccacagggacagaagtaagcgg

SEQ ID NO: 230 - DNA, 23 bp, Homo sapiens
  source 1..23: mol_type = genomic DNA
taatagcaaagaggtaaacgtgg

SEQ ID NO: 231 - DNA, 23 bp, Homo sapiens
  source 1..23: mol_type = genomic DNA
taaacaaccctaaggcagtgagg

SEQ ID NO: 232 - DNA, 23 bp, Homo sapiens
  source 1..23: mol_type = genomic DNA
gtaaaaaaataattctaacaggg

SEQ ID NO: 233 - DNA, 23 bp, Homo sapiens
  source 1..23: mol_type = genomic DNA
caacacatctcttcatacagagg

SEQ ID NO: 234 - DNA, 23 bp, Homo sapiens
  source 1..23: mol_type = genomic DNA
aattgcatataactaatctgggg

SEQ ID NO: 235 - DNA, 23 bp, Homo sapiens
  source 1..23: mol_type = genomic DNA
atatagttcttataatagtgggg

SEQ ID NO: 236 - DNA, 23 bp, Homo sapiens
  source 1..23: mol_type = genomic DNA
ataccaagtatggtaacacatgg

SEQ ID NO: 237 - DNA, 23 bp, Homo sapiens
  source 1..23: mol_type = genomic DNA
aatgaaataagtatagaacatgg

SEQ ID NO: 238 - DNA, 23 bp, Homo sapiens
  source 1..23: mol_type = genomic DNA
acgcacttgtaggatcgagtagg

SEQ ID NO: 239 - DNA, 23 bp, Homo sapiens
  source 1..23: mol_type = genomic DNA
agcaaggagtagatacagggagg

SEQ ID NO: 240 - DNA, 23 bp, Homo sapiens
  source 1..23: mol_type = genomic DNA
agggagcatataatacacaaagg

SEQ ID NO: 241 - DNA, 23 bp, Homo sapiens
  source 1..23: mol_type = genomic DNA
ctggaatttgaaatatccggggg

SEQ ID NO: 242 - DNA, 23 bp, Homo sapiens
  source 1..23: mol_type = genomic DNA
gcagcagtaacaaacgaacaggg

SEQ ID NO: 243 - DNA, 23 bp, Homo sapiens
  source 1..23: mol_type = genomic DNA
aaatagtgcccaatcctaggtgg

SEQ ID NO: 244 - DNA, 23 bp, Homo sapiens
  source 1..23: mol_type = genomic DNA
tggtaaccacaaagtaccagagg

SEQ ID NO: 245 - DNA, 23 bp, Homo sapiens
  source 1..23: mol_type = genomic DNA
gttcccattagtgaggaatgggg

SEQ ID NO: 246 - DNA, 23 bp, Homo sapiens
  source 1..23: mol_type = genomic DNA
ttgcagatttagattaactgggg

SEQ ID NO: 247 - DNA, 23 bp, Homo sapiens
  source 1..23: mol_type = genomic DNA
tatgttctgtacatcagccgggg

SEQ ID NO: 248 - DNA, 23 bp, Homo sapiens
  source 1..23: mol_type = genomic DNA
agtcctgctatagtcctaggagg

SEQ ID NO: 249 - DNA, 23 bp, Homo sapiens
  source 1..23: mol_type = genomic DNA
atgacaactggaaacgtaggtgg

SEQ ID NO: 250 - DNA, 23 bp, Homo sapiens
  source 1..23: mol_type = genomic DNA
aaaatagtatgagcatgcaacgg

SEQ ID NO: 251 - DNA, 23 bp, Homo sapiens
  source 1..23: mol_type = genomic DNA
aaaaacaaaacatatcacaaagg

SEQ ID NO: 252 - DNA, 23 bp, Homo sapiens
  source 1..23: mol_type = genomic DNA
tgacaatcatgggaacgacaagg

SEQ ID NO: 253 - DNA, 23 bp, Homo sapiens
  source 1..23: mol_type = genomic DNA
tgccaacctgaagaacgtgaggg

SEQ ID NO: 254 - DNA, 23 bp, Homo sapiens
  source 1..23: mol_type = genomic DNA
gataagcagctaacatgtgtcgg

SEQ ID NO: 255 - DNA, 23 bp, Homo sapiens
  source 1..23: mol_type = genomic DNA
ataatgtgaagtaatatgcatgg

SEQ ID NO: 256 - DNA, 23 bp, Homo sapiens
  source 1..23: mol_type = genomic DNA
tgtctaaattactattcacaagg

SEQ ID NO: 257 - DNA, 23 bp, Homo sapiens
  source 1..23: mol_type = genomic DNA
aaggatttaaaaatggactgtgg

SEQ ID NO: 258 - DNA, 23 bp, Homo sapiens
  source 1..23: mol_type = genomic DNA
acttttgattgaatcccaagggg

SEQ ID NO: 259 - DNA, 23 bp, Homo sapiens
  source 1..23: mol_type = genomic DNA
cagcctctgagccctcaaggtgg

SEQ ID NO: 260 - DNA, 23 bp, Homo sapiens
  source 1..23: mol_type = genomic DNA
tgtgccatagagcactcttgggg

SEQ ID NO: 261 - DNA, 23 bp, Homo sapiens
  source 1..23: mol_type = genomic DNA
gtgtccttgaaggtgcattgtgg

SEQ ID NO: 262 - DNA, 23 bp, Homo sapiens
  source 1..23: mol_type = genomic DNA
ggttcagtgaaaccttcgtgagg

SEQ ID NO: 263 - DNA, 23 bp, Homo sapiens
  source 1..23: mol_type = genomic DNA
aatagtgctatgcacacacaagg

SEQ ID NO: 264 - DNA, 23 bp, Homo sapiens
  source 1..23: mol_type = genomic DNA
caataagtaagcttgtgaagggg

SEQ ID NO: 265 - DNA, 23 bp, Homo sapiens
  source 1..23: mol_type = genomic DNA
aaaacaacgacgaagtggggagg

SEQ ID NO: 266 - DNA, 23 bp, Homo sapiens
  source 1..23: mol_type = genomic DNA
cctattctgagcatgcccagtgg

SEQ ID NO: 267 - DNA, 23 bp, Homo sapiens
  source 1..23: mol_type = genomic DNA
gtaaacgtggcagaaagcagggg

SEQ ID NO: 268 - DNA, 23 bp, Homo sapiens
  source 1..23: mol_type = genomic DNA
gcatataaagcagacccaagagg

SEQ ID NO: 269 - DNA, 23 bp, Homo sapiens
  source 1..23: mol_type = genomic DNA
atataaaagagaatttagtgagg

SEQ ID NO: 270 - DNA, 23 bp, Homo sapiens
  source 1..23: mol_type = genomic DNA
aggccattgaacaatttgagggg

SEQ ID NO: 271 - DNA, 23 bp, Homo sapiens
  source 1..23: mol_type = genomic DNA
gatatgattccttcaccatgagg

SEQ ID NO: 272 - DNA, 23 bp, Homo sapiens
  source 1..23: mol_type = genomic DNA
gtataatatcaaaaagatggggg

SEQ ID NO: 273 - DNA, 23 bp, Homo sapiens
  source 1..23: mol_type = genomic DNA
tatgggtaaatataagaacatgg

SEQ ID NO: 274 - DNA, 23 bp, Homo sapiens
  source 1..23: mol_type = genomic DNA
aactctctgatggagttgtgggg

SEQ ID NO: 275 - DNA, 23 bp, Homo sapiens
  source 1..23: mol_type = genomic DNA
gcgaagccactacccatgggggg

SEQ ID NO: 276 - DNA, 23 bp, Homo sapiens
  source 1..23: mol_type = genomic DNA
atatgtactgaaagcaactgcgg

SEQ ID NO: 277 - DNA, 23 bp, Homo sapiens
  source 1..23: mol_type = genomic DNA
aagaaatgttggcttgtaggtgg

SEQ ID NO: 278 - DNA, 23 bp, Homo sapiens
  source 1..23: mol_type = genomic DNA
acaacgcataaagagaacacagg

SEQ ID NO: 279 - DNA, 23 bp, Homo sapiens
  source 1..23: mol_type = genomic DNA
aatctaagtggaagtccaagggg

SEQ ID NO: 280 - DNA, 23 bp, Homo sapiens
  source 1..23: mol_type = genomic DNA
ccttgtagttatcccacatgggg

SEQ ID NO: 281 - DNA, 23 bp, Homo sapiens
  source 1..23: mol_type = genomic DNA
gggtgacgtgcatatgtgcgtgg

SEQ ID NO: 282 - DNA, 23 bp, Homo sapiens
  source 1..23: mol_type = genomic DNA
agacatttaatatatgcccaggg

SEQ ID NO: 283 - DNA, 23 bp, Homo sapiens
  source 1..23: mol_type = genomic DNA
taggagttcagagcatggtgagg

SEQ ID NO: 284 - DNA, 23 bp, Homo sapiens
  source 1..23: mol_type = genomic DNA
gatgtggtggataacagcaaggg

SEQ ID NO: 285 - DNA, 23 bp, Homo sapiens
  source 1..23: mol_type = genomic DNA
aagatggcgaatattgacaaggg

SEQ ID NO: 286 - DNA, 23 bp, Homo sapiens
  source 1..23: mol_type = genomic DNA
agatccgaacaaaccatcagcgg

SEQ ID NO: 287 - DNA, 23 bp, Homo sapiens
  source 1..23: mol_type = genomic DNA
taagggtgagtagtaacaggagg

SEQ ID NO: 288 - DNA, 23 bp, Homo sapiens
  source 1..23: mol_type = genomic DNA
tctaatctctgtaagccaagtgg

SEQ ID NO: 289 - DNA, 23 bp, Homo sapiens
  source 1..23: mol_type = genomic DNA
gcatcaatagctaattctagggg

SEQ ID NO: 290 - DNA, 23 bp, Homo sapiens
  source 1..23: mol_type = genomic DNA
tacacctgaaggtaaatggatgg

SEQ ID NO: 291 - DNA, 23 bp, Homo sapiens
  source 1..23: mol_type = genomic DNA
tcttcagctatgaccagacgtgg

SEQ ID NO: 292 - DNA, 23 bp, Homo sapiens
  source 1..23: mol_type = genomic DNA
ataacagccagagtaataccagg

SEQ ID NO: 293 - DNA, 23 bp, Homo sapiens
  source 1..23: mol_type = genomic DNA
agtgagagctagaagccgtgtgg

SEQ ID NO: 294 - DNA, 23 bp, Homo sapiens
  source 1..23: mol_type = genomic DNA
cattgtgtaaaacaatatagcgg

SEQ ID NO: 295 - DNA, 23 bp, Homo sapiens
  source 1..23: mol_type = genomic DNA
ttggttggtattgatcagagagg

SEQ ID NO: 296 - DNA, 23 bp, Homo sapiens
  source 1..23: mol_type = genomic DNA
acaagattgaggaacaaaggtgg

SEQ ID NO: 297 - DNA, 23 bp, Homo sapiens
  source 1..23: mol_type = genomic DNA
ttagaaccaaaagtcgatggagg

SEQ ID NO: 298 - DNA, 23 bp, Homo sapiens
  source 1..23: mol_type = genomic DNA
atgtaatctacgaatcattgggg

SEQ ID NO: 299 - DNA, 23 bp, Homo sapiens
  source 1..23: mol_type = genomic DNA
caatttgtcaaagctgactgggg

SEQ ID NO: 300 - DNA, 23 bp, Homo sapiens
  source 1..23: mol_type = genomic DNA
aggggttaaagattactgagagg

SEQ ID NO: 301 - DNA, 23 bp, Homo sapiens
  source 1..23: mol_type = genomic DNA
tctatgatgaaggaaatggtggg

SEQ ID NO: 302 - DNA, 23 bp, Homo sapiens
  source 1..23: mol_type = genomic DNA
taggatgtgatatctggcagtgg

SEQ ID NO: 303 - DNA, 23 bp, Homo sapiens
  source 1..23: mol_type = genomic DNA
agaaacttaacagaaaaaggagg

SEQ ID NO: 304 - DNA, 23 bp, Homo sapiens
  source 1..23: mol_type = genomic DNA
ccagatctgagtcctgtaggggg

SEQ ID NO: 305 - DNA, 23 bp, Homo sapiens
  source 1..23: mol_type = genomic DNA
cttaggagtaattaccacggtgg

SEQ ID NO: 306 - DNA, 23 bp, Homo sapiens
  source 1..23: mol_type = genomic DNA
ccaaagttgggcaaagactgggg

SEQ ID NO: 307 - DNA, 23 bp, Homo sapiens
  source 1..23: mol_type = genomic DNA
acttccgtatttggtgaacaggg

SEQ ID NO: 308 - DNA, 23 bp, Homo sapiens
  source 1..23: mol_type = genomic DNA
tacaggccatgggaatgatgggg

SEQ ID NO: 309 - DNA, 23 bp, Homo sapiens
  source 1..23: mol_type = genomic DNA
tgggagagattacactcccgtgg

SEQ ID NO: 310 - DNA, 23 bp, Homo sapiens
  source 1..23: mol_type = genomic DNA
attagtcatggagtcctaagggg

SEQ ID NO: 311 - DNA, 23 bp, Homo sapiens
  source 1..23: mol_type = genomic DNA
agctaagccactgattactgtgg

SEQ ID NO: 312 - DNA, 23 bp, Homo sapiens
  source 1..23: mol_type = genomic DNA
gataatagctgaacattacgtgg

SEQ ID NO: 313 - DNA, 23 bp, Homo sapiens
  source 1..23: mol_type = genomic DNA
gcttcatcagaaacctagtgtgg

SEQ ID NO: 314 - DNA, 23 bp, Homo sapiens
  source 1..23: mol_type = genomic DNA
tgaagactttcgtctcagagagg

SEQ ID NO: 315 - DNA, 23 bp, Homo sapiens
  source 1..23: mol_type = genomic DNA
gaaaagcttaaagctaacggagg

SEQ ID NO: 316 - DNA, 23 bp, Homo sapiens
  source 1..23: mol_type = genomic DNA
agccgttagagaaagtgttgtgg

SEQ ID NO: 317 - DNA, 23 bp, Homo sapiens
  source 1..23: mol_type = genomic DNA
gagggtgaggaaactcacacggg

SEQ ID NO: 318 - DNA, 23 bp, Homo sapiens
  source 1..23: mol_type = genomic DNA
ggtaagagttagttacacatggg

SEQ ID NO: 319 - DNA, 23 bp, Homo sapiens
  source 1..23: mol_type = genomic DNA
aattacggtgctacaagacgagg

SEQ ID NO: 320 - DNA, 23 bp, Homo sapiens
  source 1..23: mol_type = genomic DNA
gagcttccactaggccagagggg

SEQ ID NO: 321 - DNA, 23 bp, Homo sapiens
  source 1..23: mol_type = genomic DNA
cctagaattgacgttacaggagg

SEQ ID NO: 322 - DNA, 23 bp, Homo sapiens
  source 1..23: mol_type = genomic DNA
atggaatgcagtgttcagagtgg

SEQ ID NO: 323 - DNA, 23 bp, Homo sapiens
  source 1..23: mol_type = genomic DNA
ggaacaacaggaaggattagggg

SEQ ID NO: 324 - DNA, 23 bp, Homo sapiens
  source 1..23: mol_type = genomic DNA
aggatgacaactggaaacgtagg

SEQ ID NO: 325 - DNA, 23 bp, Homo sapiens
  source 1..23: mol_type = genomic DNA
tttccacaaagttttcccagtgg

SEQ ID NO: 326 - DNA, 23 bp, Homo sapiens
  source 1..23: mol_type = genomic DNA
tggttgtgtcaacgaagaggagg

SEQ ID NO: 327 - DNA, 23 bp, Homo sapiens
  source 1..23: mol_type = genomic DNA
atgttggagcaatagccacaggg

SEQ ID NO: 328 - DNA, 23 bp, Homo sapiens
  source 1..23: mol_type = genomic DNA
gctagaagtagaaaagcaggagg

SEQ ID NO: 329 - DNA, 23 bp, Homo sapiens
  source 1..23: mol_type = genomic DNA
aaacgaatattggcgccatgagg

SEQ ID NO: 330 - DNA, 23 bp, Homo sapiens
  source 1..23: mol_type = genomic DNA
tgatatgctaaataaaagggggg

SEQ ID NO: 331 - DNA, 23 bp, Homo sapiens
  source 1..23: mol_type = genomic DNA
aaataaggtgggatccaaggtgg

SEQ ID NO: 332 - DNA, 23 bp, Homo sapiens
  source 1..23: mol_type = genomic DNA
tacggtgctacaagacgaggagg

SEQ ID NO: 333 - DNA, 23 bp, Homo sapiens
  source 1..23: mol_type = genomic DNA
attgcggtgcctaaagctcgagg

SEQ ID NO: 334 - DNA, 23 bp, Homo sapiens
  source 1..23: mol_type = genomic DNA
aagtttcctccctagaggagggg

SEQ ID NO: 335 - DNA, 23 bp, Homo sapiens
  source 1..23: mol_type = genomic DNA
catccaaatacccctcatagggg

SEQ ID NO: 336 - DNA, 23 bp, Homo sapiens
  source 1..23: mol_type = genomic DNA
gtccagaacatgttacaacaggg

SEQ ID NO: 337 - DNA, 23 bp, Homo sapiens
  source 1..23: mol_type = genomic DNA
ccatgaaatgcacacctgggtgg

SEQ ID NO: 338 - DNA, 23 bp, Homo sapiens
  source 1..23: mol_type = genomic DNA
gccaattatctaattctcagggg

SEQ ID NO: 339 - DNA, 23 bp, Homo sapiens
  source 1..23: mol_type = genomic DNA
ctattagttagacttccttgggg

SEQ ID NO: 340 - DNA, 23 bp, Homo sapiens
  source 1..23: mol_type = genomic DNA
ctggaaagccattcacctcgagg

SEQ ID NO: 341 - DNA, 23 bp, Homo sapiens
  source 1..23: mol_type = genomic DNA
atatgcaaatcagtatggagtgg

SEQ ID NO: 342 - DNA, 23 bp, Homo sapiens
  source 1..23: mol_type = genomic DNA
atacagtactaaacagcctgagg

SEQ ID NO: 343 - DNA, 23 bp, Homo sapiens
  source 1..23: mol_type = genomic DNA
gagtaagtatattcattgtgggg

SEQ ID NO: 344 - DNA, 23 bp, Homo sapiens
  source 1..23: mol_type = genomic DNA
gctcaatctactaagtaaccagg

SEQ ID NO: 345 - DNA, 23 bp, Homo sapiens
  source 1..23: mol_type = genomic DNA
agcttgttgagagccacacacgg

SEQ ID NO: 346 - DNA, 23 bp, Homo sapiens
  source 1..23: mol_type = genomic DNA
acatgggcatatcaacaatgagg

SEQ ID NO: 347 - DNA, 23 bp, Homo sapiens
  source 1..23: mol_type = genomic DNA
tcaaaagcaggatcttacaaagg

SEQ ID NO: 348 - DNA, 23 bp, Homo sapiens
  source 1..23: mol_type = genomic DNA
cctcaattagaaaaatgcagagg

SEQ ID NO: 349 - DNA, 23 bp, Homo sapiens
  source 1..23: mol_type = genomic DNA
ggtgtgtacacctaatccaaagg

SEQ ID NO: 350 - DNA, 23 bp, Homo sapiens
  source 1..23: mol_type = genomic DNA
ataaacatgtggtagtggtgagg

SEQ ID NO: 351 - DNA, 23 bp, Homo sapiens
  source 1..23: mol_type = genomic DNA
aatgcttgtaatggatgtgacgg

SEQ ID NO: 352 - DNA, 23 bp, Homo sapiens
  source 1..23: mol_type = genomic DNA
caaaacccatcaactataggcgg

SEQ ID NO: 353 - DNA, 23 bp, Homo sapiens
  source 1..23: mol_type = genomic DNA
gaaaaaagtactcacaagggagg

SEQ ID NO: 354 - DNA, 23 bp, Homo sapiens
  source 1..23: mol_type = genomic DNA
gtttatgctctcccgcacaatgg

SEQ ID NO: 355 - DNA, 23 bp, Homo sapiens
  source 1..23: mol_type = genomic DNA
tggattggacagacgctaggtgg

SEQ ID NO: 356 - DNA, 23 bp, Homo sapiens
  source 1..23: mol_type = genomic DNA
agattgttacggaagttttgggg

SEQ ID NO: 357 - DNA, 23 bp, Homo sapiens
  source 1..23: mol_type = genomic DNA
gtatgacaagagacatccatggg

SEQ ID NO: 358 - DNA, 23 bp, Homo sapiens
  source 1..23: mol_type = genomic DNA
gtgacaagcttagcgaacagtgg

SEQ ID NO: 359 - DNA, 23 bp, Homo sapiens
  source 1..23: mol_type = genomic DNA
tagtacttaagtagtatgggtgg

SEQ ID NO: 360 - DNA, 23 bp, Homo sapiens
  source 1..23: mol_type = genomic DNA
tttctcttacacattctatgggg

SEQ ID NO: 361 - DNA, 23 bp, Homo sapiens
  source 1..23: mol_type = genomic DNA
cctttactgaaatcagacaaggg

SEQ ID NO: 362 - DNA, 23 bp, Homo sapiens
  source 1..23: mol_type = genomic DNA
cctaccaagagaagaagaggggg

SEQ ID NO: 363 - DNA, 23 bp, Homo sapiens
  source 1..23: mol_type = genomic DNA
gtgatatccagcatagatggggg

SEQ ID NO: 364 - DNA, 23 bp, Homo sapiens
  source 1..23: mol_type = genomic DNA
taaataaatatactaaccagtgg

SEQ ID NO: 365 - DNA, 23 bp, Homo sapiens
  source 1..23: mol_type = genomic DNA
tggtgctttagacattacccagg

SEQ ID NO: 366 - DNA, 23 bp, Homo sapiens
  source 1..23: mol_type = genomic DNA
tcaagcaacactcacacgggtgg

SEQ ID NO: 367 - DNA, 23 bp, Homo sapiens
  source 1..23: mol_type = genomic DNA
agtgcatactctagtagtgacgg

SEQ ID NO: 368 - DNA, 23 bp, Homo sapiens
  source 1..23: mol_type = genomic DNA
acgaaggagaaaattctttgggg

SEQ ID NO: 369 - DNA, 23 bp, Homo sapiens
  source 1..23: mol_type = genomic DNA
agaactggtaaacaactgcaggg

SEQ ID NO: 370 - DNA, 23 bp, Homo sapiens
  source 1..23: mol_type = genomic DNA
acaaaccaggaaaaatgagaggg

SEQ ID NO: 371 - DNA, 23 bp, Homo sapiens
  source 1..23: mol_type = genomic DNA
ttcaggtagatgatgacaggggg

SEQ ID NO: 372 - DNA, 23 bp, Homo sapiens
  source 1..23: mol_type = genomic DNA
agtcttagccaaaagcagagtgg

SEQ ID NO: 373 - DNA, 23 bp, Homo sapiens
  source 1..23: mol_type = genomic DNA
tcacttttagtgttcccctgagg

SEQ ID NO: 374 - DNA, 23 bp, Homo sapiens
  source 1..23: mol_type = genomic DNA
tgattacattagcttcagagtgg

SEQ ID NO: 375 - DNA, 23 bp, Homo sapiens
  source 1..23: mol_type = genomic DNA
ggaaaaagattccagaaaggggg

SEQ ID NO: 376 - DNA, 23 bp, Homo sapiens
  source 1..23: mol_type = genomic DNA
acgggaagctcagacagctgggg

SEQ ID NO: 377 - DNA, 23 bp, Homo sapiens
  source 1..23: mol_type = genomic DNA
gtgcctatcctaataagcagggg

SEQ ID NO: 378 - DNA, 23 bp, Homo sapiens
  source 1..23: mol_type = genomic DNA
tactaagtgaatggaaatggagg

SEQ ID NO: 379 - DNA, 23 bp, Homo sapiens
  source 1..23: mol_type = genomic DNA
tccattatttttgaccactgcgg

SEQ ID NO: 380 - DNA, 23 bp, Homo sapiens
  source 1..23: mol_type = genomic DNA
gcaatatgggaggaaattagggg

SEQ ID NO: 381 - DNA, 23 bp, Homo sapiens
  source 1..23: mol_type = genomic DNA
aattttaaaaagtttcacaaggg

SEQ ID NO: 382 - DNA, 23 bp, Homo sapiens
  source 1..23: mol_type = genomic DNA
aatccttctgatacagaaggtgg

SEQ ID NO: 383 - DNA, 23 bp, Homo sapiens
  source 1..23: mol_type = genomic DNA
gaataaatactgttattcagagg

SEQ ID NO: 384 - DNA, 23 bp, Homo sapiens
  source 1..23: mol_type = genomic DNA
gtagatatatacataaatggggg

SEQ ID NO: 385 - DNA, 23 bp, Homo sapiens
  source 1..23: mol_type = genomic DNA
taattatgtgtcaacacctgagg

SEQ ID NO: 386 - DNA, 23 bp, Homo sapiens
  source 1..23: mol_type = genomic DNA
cactgaagactataaaactgagg

SEQ ID NO: 387 - DNA, 23 bp, Homo sapiens
  source 1..23: mol_type = genomic DNA
cataattctcaaaaagagggggg

SEQ ID NO: 388 - DNA, 23 bp, Homo sapiens
  source 1..23: mol_type = genomic DNA
cattgatgatgccttgagtgtgg

SEQ ID NO: 389 - DNA, 23 bp, Homo sapiens
  source 1..23: mol_type = genomic DNA
tgggatttgaagacttcacgtgg

SEQ ID NO: 390 - DNA, 23 bp, Homo sapiens
  source 1..23: mol_type = genomic DNA
acaagggcagtgataaggagagg

SEQ ID NO: 391 - DNA, 23 bp, Homo sapiens
  source 1..23: mol_type = genomic DNA
actatggtaacaagagagtgagg

SEQ ID NO: 392 - DNA, 23 bp, Homo sapiens
  source 1..23: mol_type = genomic DNA
atgaattcaacacacccggaggg

SEQ ID NO: 393 - DNA, 23 bp, Homo sapiens
  source 1..23: mol_type = genomic DNA
attctcaagtgcagtcaccaggg

SEQ ID NO: 394 - DNA, 23 bp, Homo sapiens
  source 1..23: mol_type = genomic DNA
atttatggcataattaccagagg

SEQ ID NO: 395 - DNA, 23 bp, Homo sapiens
  source 1..23: mol_type = genomic DNA
gcagtatgatgaagtgcaggggg

SEQ ID NO: 396 - DNA, 23 bp, Homo sapiens
  source 1..23: mol_type = genomic DNA
tgtctattaagcatcaacctagg

SEQ ID NO: 397 - DNA, 23 bp, Homo sapiens
  source 1..23: mol_type = genomic DNA
tatagctgtatcatttactgagg

SEQ ID NO: 398 - DNA, 23 bp, Homo sapiens
  source 1..23: mol_type = genomic DNA
gttacatttaaccttcaccatgg

SEQ ID NO: 399 - DNA, 23 bp, Homo sapiens
  source 1..23: mol_type = genomic DNA
agttttctaccatagacaagggg

SEQ ID NO: 400 - DNA, 23 bp, Homo sapiens
  source 1..23: mol_type = genomic DNA
ctgacagcccattagagacgggg

SEQ ID NO: 401 - DNA, 23 bp, Homo sapiens
  source 1..23: mol_type = genomic DNA
aatggcaccattatccacccagg

SEQ ID NO: 402 - DNA, 23 bp, Homo sapiens
  source 1..23: mol_type = genomic DNA
aattctttcccagaacaatgtgg

SEQ ID NO: 403 - DNA, 23 bp, Homo sapiens
  source 1..23: mol_type = genomic DNA
agcagtatgatgaagtgcagggg

SEQ ID NO: 404 - DNA, 23 bp, Homo sapiens
  source 1..23: mol_type = genomic DNA
taaactgcagacacttccacggg

SEQ ID NO: 405 - DNA, 23 bp, Homo sapiens
  source 1..23: mol_type = genomic DNA
taaaaaatgagagataggtgggg

SEQ ID NO: 406 - DNA, 23 bp, Homo sapiens
  source 1..23: mol_type = genomic DNA
acacttgagaagaaactagacgg

SEQ ID NO: 407 - DNA, 23 bp, Homo sapiens
  source 1..23: mol_type = genomic DNA
gatggagtcaacatttccaaagg

SEQ ID NO: 408 - DNA, 23 bp, Homo sapiens
  source 1..23: mol_type = genomic DNA
ataaatatccttgatgcctgtgg

SEQ ID NO: 409 - DNA, 23 bp, Homo sapiens
  source 1..23: mol_type = genomic DNA
gtggaaaacagaagtcaatgagg

SEQ ID NO: 410 - DNA, 23 bp, Homo sapiens
  source 1..23: mol_type = genomic DNA
tgtgtgtgtataggtctcatggg

SEQ ID NO: 411 - DNA, 23 bp, Homo sapiens
  source 1..23: mol_type = genomic DNA
actgaacaattggtatactgagg

SEQ ID NO: 412 - DNA, 23 bp, Homo sapiens
  source 1..23: mol_type = genomic DNA
atacagatatagcacataccagg

SEQ ID NO: 413 - DNA, 23 bp, Homo sapiens
  source 1..23: mol_type = genomic DNA
atgcgaagccactacccatgggg

SEQ ID NO: 414 - DNA, 23 bp, Homo sapiens
  source 1..23: mol_type = genomic DNA
tcatttgcatggctctacgtggg

SEQ ID NO: 415 - DNA, 23 bp, Homo sapiens
  source 1..23: mol_type = genomic DNA
gtataagacagggtacctgaggg

SEQ ID NO: 416 - DNA, 23 bp, Homo sapiens
  source 1..23: mol_type = genomic DNA
gggctcacattgtagaaatgtgg

SEQ ID NO: 417 - DNA, 23 bp, Homo sapiens
  source 1..23: mol_type = genomic DNA
atgtggttgtgtcaacgaagagg

SEQ ID NO: 418 - DNA, 23 bp, Homo sapiens
  source 1..23: mol_type = genomic DNA
ctgacaagtttcctccctagagg

SEQ ID NO: 419 - DNA, 23 bp, Homo sapiens
  source 1..23: mol_type = genomic DNA
gtgaaaagtgatgtgagacaagg

SEQ ID NO: 420 - DNA, 23 bp, Homo sapiens
  source 1..23: mol_type = genomic DNA
gtaattttggtatatatacgtgg

SEQ ID NO: 421 - DNA, 23 bp, Homo sapiens
  source 1..23: mol_type = genomic DNA
gtgctcggcatgaatgcagtggg

SEQ ID NO: 422 - DNA, 23 bp, Homo sapiens
  source 1..23: mol_type = genomic DNA
gtctgctacatgaggaacagcgg

SEQ ID NO: 423 - DNA, 23 bp, Homo sapiens
  source 1..23: mol_type = genomic DNA
aaatcaacaccgataatacaggg

SEQ ID NO: 424 - DNA, 23 bp, Homo sapiens
  source 1..23: mol_type = genomic DNA
tcctgcctgatacaaccagaagg

SEQ ID NO: 425 - DNA, 23 bp, Homo sapiens
  source 1..23: mol_type = genomic DNA
tgactcatcacatcctggagagg

SEQ ID NO: 426 - DNA, 23 bp, Homo sapiens
  source 1..23: mol_type = genomic DNA
cagacaaatggtcaaacacaggg

SEQ ID NO: 427 - DNA, 23 bp, Homo sapiens
  source 1..23: mol_type = genomic DNA
tgaacaaaaagctaagaactggg

SEQ ID NO: 428 - DNA, 23 bp, Homo sapiens
  source 1..23: mol_type = genomic DNA
tatttcacagtagatatccaggg

SEQ ID NO: 429 - DNA, 23 bp, Homo sapiens
  source 1..23: mol_type = genomic DNA
tgtggtctcacatacaaaccagg

SEQ ID NO: 430 - DNA, 23 bp, Homo sapiens
  source 1..23: mol_type = genomic DNA
aggtcatgtgtaagtcacaaagg

SEQ ID NO: 431 - DNA, 23 bp, Homo sapiens
  source 1..23: mol_type = genomic DNA
aagcaactagcaatagacaaagg

SEQ ID NO: 432 - DNA, 23 bp, Homo sapiens
  source 1..23: mol_type = genomic DNA
aaaggctgccagagtaacacggg

SEQ ID NO: 433 - DNA, 23 bp, Homo sapiens
  source 1..23: mol_type = genomic DNA
acatgaccttacatacatcacgg

SEQ ID NO: 434 - DNA, 23 bp, Homo sapiens
  source 1..23: mol_type = genomic DNA
attgcctctcatatttacagagg

SEQ ID NO: 435 - DNA, 23 bp, Homo sapiens
  source 1..23: mol_type = genomic DNA
ttggcattgtataaacatcaggg

SEQ ID NO: 436 - DNA, 23 bp, Homo sapiens
  source 1..23: mol_type = genomic DNA
ggcctttgaagaaatcacgctgg

SEQ ID NO: 437 - DNA, 23 bp, Homo sapiens
  source 1..23: mol_type = genomic DNA
gtgtttcaaacactactgatggg

SEQ ID NO: 438 - DNA, 23 bp, Homo sapiens
  source 1..23: mol_type = genomic DNA
cttgaagagataaaaacaagcgg

SEQ ID NO: 439 - DNA, 23 bp, Homo sapiens
  source 1..23: mol_type = genomic DNA
ccttgaagcatacattaccgtgg

SEQ ID NO: 440 - DNA, 23 bp, Homo sapiens
  source 1..23: mol_type = genomic DNA
tcttaattaatgttactgagagg

SEQ ID NO: 441 - DNA, 23 bp, Homo sapiens
  source 1..23: mol_type = genomic DNA
gggctggcttgaaaatcaggagg

SEQ ID NO: 442 - DNA, 23 bp, Homo sapiens
  source 1..23: mol_type = genomic DNA
tcacaaaaaacgttgtgtagggg

SEQ ID NO: 443 - DNA, 23 bp, Homo sapiens
  source 1..23: mol_type = genomic DNA
aaaatactcatgaagtaccaagg

SEQ ID NO: 444 - DNA, 23 bp, Homo sapiens
  source 1..23: mol_type = genomic DNA
atatgtgagtagaatacactggg

SEQ ID NO: 445 - DNA, 23 bp, Homo sapiens
  source 1..23: mol_type = genomic DNA
atcctccagattcataacgaagg

SEQ ID NO: 446 - DNA, 23 bp, Homo sapiens
  source 1..23: mol_type = genomic DNA
atttagacaaccacactgagagg

SEQ ID NO: 447 - DNA, 23 bp, Homo sapiens
  source 1..23: mol_type = genomic DNA
ataattctcccatctaagtgtgg

SEQ ID NO: 448 - DNA, 23 bp, Homo sapiens
  source 1..23: mol_type = genomic DNA
attagatgaagaaaatcacatgg

SEQ ID NO: 449 - DNA, 23 bp, Homo sapiens
  source 1..23: mol_type = genomic DNA
acacgtgttggacgttagtgggg

SEQ ID NO: 450 - DNA, 23 bp, Homo sapiens
  source 1..23: mol_type = genomic DNA
aggtacctaatagcaagaccagg

SEQ ID NO: 451 - DNA, 23 bp, Homo sapiens
  source 1..23: mol_type = genomic DNA
agtaagaattgagatatgtgcgg

SEQ ID NO: 452 - DNA, 23 bp, Homo sapiens
  source 1..23: mol_type = genomic DNA
gaccaactaaaatattgtcgtgg

SEQ ID NO: 453 - DNA, 23 bp, Homo sapiens
  source 1..23: mol_type = genomic DNA
aatacattaaaaccagacaaagg

SEQ ID NO: 454 - DNA, 23 bp, Homo sapiens
  source 1..23: mol_type = genomic DNA
atctggcctaggctacatgtagg

SEQ ID NO: 455 - DNA, 23 bp, Homo sapiens
  source 1..23: mol_type = genomic DNA
aaatcagtgatacatatcgatgg

SEQ ID NO: 456 - DNA, 23 bp, Homo sapiens
  source 1..23: mol_type = genomic DNA
tctgaagagcaacacctgagagg

SEQ ID NO: 457 - DNA, 23 bp, Homo sapiens
  source 1..23: mol_type = genomic DNA
gtaaacgacatacaaacttgagg

SEQ ID NO: 458 - DNA, 23 bp, Homo sapiens
  source 1..23: mol_type = genomic DNA
ttaaaatctagagtattacaggg

SEQ ID NO: 459 - DNA, 23 bp, Homo sapiens
  source 1..23: mol_type = genomic DNA
gaaagaatttgaataccaagagg

SEQ ID NO: 460 - DNA, 23 bp, Homo sapiens
  source 1..23: mol_type = genomic DNA
attgagaaaaagttgtcgtgggg

SEQ ID NO: 461 - DNA, 23 bp, Homo sapiens
  source 1..23: mol_type = genomic DNA
gttatcaaagtgttaaacacagg

SEQ ID NO: 462 - DNA, 23 bp, Homo sapiens
  source 1..23: mol_type = genomic DNA
gttgtatgattggatgtactggg

SEQ ID NO: 463 - DNA, 23 bp, Homo sapiens
  source 1..23: mol_type = genomic DNA
atggctgcatgataattagtggg

SEQ ID NO: 464 - DNA, 23 bp, Homo sapiens
  source 1..23: mol_type = genomic DNA
atacacgatgatctagtacaagg

SEQ ID NO: 465 - DNA, 23 bp, Homo sapiens
  source 1..23: mol_type = genomic DNA
gcagtactctttgtagacaaggg

SEQ ID NO: 466 - DNA, 23 bp, Homo sapiens
  source 1..23: mol_type = genomic DNA
tgtgggagacatcaccacaatgg

SEQ ID NO: 467 - DNA, 23 bp, Homo sapiens
  source 1..23: mol_type = genomic DNA
cataactagagaggaaatggagg

SEQ ID NO: 468 - DNA, 23 bp, Homo sapiens
  source 1..23: mol_type = genomic DNA
gcagctactctagctcatgtggg

SEQ ID NO: 469 - DNA, 23 bp, Homo sapiens
  source 1..23: mol_type = genomic DNA
ctaaaaagtacaagactgtgagg

SEQ ID NO: 470 - DNA, 23 bp, Homo sapiens
  source 1..23: mol_type = genomic DNA
tgtagcttagtctcacagcaagg

SEQ ID NO: 471 - DNA, 23 bp, Homo sapiens
  source 1..23: mol_type = genomic DNA
agtggtgattccaatcattgggg

SEQ ID NO: 472 - DNA, 23 bp, Homo sapiens
  source 1..23: mol_type = genomic DNA
agacacctaatgctaaaagtggg

SEQ ID NO: 473 - DNA, 23 bp, Homo sapiens
  source 1..23: mol_type = genomic DNA
tgcacaacaaaagcttaacatgg

SEQ ID NO: 474 - DNA, 23 bp, Homo sapiens
  source 1..23: mol_type = genomic DNA
gctagtggggaaggaccgggtgg

SEQ ID NO: 475 - DNA, 23 bp, Homo sapiens
  source 1..23: mol_type = genomic DNA
atcatcaccaaacctaatcgagg

SEQ ID NO: 476 - DNA, 23 bp, Homo sapiens
  source 1..23: mol_type = genomic DNA
tcctatgaatgacatacctgcgg

SEQ ID NO: 477 - DNA, 23 bp, Homo sapiens
  source 1..23: mol_type = genomic DNA
atttcacctaaattacacaaagg

SEQ ID NO: 478 - DNA, 23 bp, Homo sapiens
  source 1..23: mol_type = genomic DNA
tgtgatatccagcatagatgggg

SEQ ID NO: 479 - DNA, 23 bp, Homo sapiens
  source 1..23: mol_type = genomic DNA
catccataatcagagaagggagg

SEQ ID NO: 480 - DNA, 23 bp, Homo sapiens
  source 1..23: mol_type = genomic DNA
gatccaaagaccatttcccaggg

SEQ ID NO: 481 - DNA, 23 bp, Homo sapiens
  source 1..23: mol_type = genomic DNA
ccacatgtaaaaatctccagagg

SEQ ID NO: 482 - DNA, 23 bp, Homo sapiens
  source 1..23: mol_type = genomic DNA
ataatgacagagtgaaagtgagg

SEQ ID NO: 483 - DNA, 23 bp, Homo sapiens
  source 1..23: mol_type = genomic DNA
gggttctaaaaatcgtacgcagg

SEQ ID NO: 484 - DNA, 23 bp, Homo sapiens
  source 1..23: mol_type = genomic DNA
tcatataataccataagctgagg

SEQ ID NO: 485 - DNA, 23 bp, Homo sapiens
  source 1..23: mol_type = genomic DNA
agaaagatacagtctaggggtgg

SEQ ID NO: 486 - DNA, 23 bp, Homo sapiens
  source 1..23: mol_type = genomic DNA
gaaaatactcagtaagactgagg

SEQ ID NO: 487 - DNA, 23 bp, Homo sapiens
  source 1..23: mol_type = genomic DNA
tagattgaaagcattaacaatgg

SEQ ID NO: 488 - DNA, 23 bp, Homo sapiens
  source 1..23: mol_type = genomic DNA
caaccagcaaaataaccctaggg

SEQ ID NO: 489 - DNA, 23 bp, Homo sapiens
  source 1..23: mol_type = genomic DNA
tttgaaggttgacaactaagggg

SEQ ID NO: 490 - DNA, 23 bp, Homo sapiens
  source 1..23: mol_type = genomic DNA
gggtggacaggtaaagaacaggg

SEQ ID NO: 491 - DNA, 23 bp, Homo sapiens
  source 1..23: mol_type = genomic DNA
tgaaagcatttaaaaactggggg

SEQ ID NO: 492 - DNA, 23 bp, Homo sapiens
  source 1..23: mol_type = genomic DNA
ctgaaaagaggaaataatcgtgg

SEQ ID NO: 493 - DNA, 23 bp, Homo sapiens
  source 1..23: mol_type = genomic DNA
agtaattctctgtaggcaagcgg

SEQ ID NO: 494 - DNA, 23 bp, Homo sapiens
  source 1..23: mol_type = genomic DNA
gcctttcgcatagacatctgagg

SEQ ID NO: 495 - DNA, 23 bp, Homo sapiens
  source 1..23: mol_type = genomic DNA
tgtttgcacaatctaccagatgg

SEQ ID NO: 496 - DNA, 23 bp, Homo sapiens
  source 1..23: mol_type = genomic DNA
actgtgtgtcccgaagagatggg

SEQ ID NO: 497 - DNA, 23 bp, Homo sapiens
  source 1..23: mol_type = genomic DNA
gatttataatgattaccaagtgg

SEQ ID NO: 498 - DNA, 23 bp, Homo sapiens
  source 1..23: mol_type = genomic DNA
ttgcctttgatgaaaatacgtgg

SEQ ID NO: 499 - DNA, 23 bp, Homo sapiens
  source 1..23: mol_type = genomic DNA
aaccacactgagaggaaaggagg

SEQ ID NO: 500 - DNA, 23 bp, Homo sapiens
  source 1..23: mol_type = genomic DNA
ggttccaaaaaaaagcagaacgg

SEQ ID NO: 501 - DNA, 23 bp, Homo sapiens
  source 1..23: mol_type = genomic DNA
ttataatccactgattgtagggg

SEQ ID NO: 502 - DNA, 23 bp, Homo sapiens
  source 1..23: mol_type = genomic DNA
ggagctgcagcttttcaaagggg

SEQ ID NO: 503 - DNA, 23 bp, Homo sapiens
  source 1..23: mol_type = genomic DNA
tctgctggatgaaagaacacagg

SEQ ID NO: 504 - DNA, 23 bp, Homo sapiens
  source 1..23: mol_type = genomic DNA
gattaaaaatcaccaaaacaagg

SEQ ID NO: 505 - DNA, 23 bp, Homo sapiens
  source 1..23: mol_type = genomic DNA
aaccatgcttgacgctaggatgg

SEQ ID NO: 506 - DNA, 23 bp, Homo sapiens
  source 1..23: mol_type = genomic DNA
agtctatatcaaaatataggggg

SEQ ID NO: 507 - DNA, 23 bp, Homo sapiens
  source 1..23: mol_type = genomic DNA
tatgtttctaaaaacaaccgtgg

SEQ ID NO: 508 - DNA, 23 bp, Homo sapiens
  source 1..23: mol_type = genomic DNA
ttaaaataaccattatcaccagg

SEQ ID NO: 509 - DNA, 23 bp, Homo sapiens
  source 1..23: mol_type = genomic DNA
aatgtgacttatgagactgaagg

SEQ ID NO: 510 - DNA, 23 bp, Homo sapiens
  source 1..23: mol_type = genomic DNA
attcacaattgaccatttcgggg

SEQ ID NO: 511 - DNA, 23 bp, Homo sapiens
  source 1..23: mol_type = genomic DNA
gtagaaatggaataaacatgtgg

SEQ ID NO: 512 - DNA, 23 bp, Homo sapiens
  source 1..23: mol_type = genomic DNA
tgttttgatagcaatacctgagg

SEQ ID NO: 513 - DNA, 23 bp, Homo sapiens
  source 1..23: mol_type = genomic DNA
ttagtgtactgagaaatgaaagg

SEQ ID NO: 514 - DNA, 23 bp, Homo sapiens
  source 1..23: mol_type = genomic DNA
cagtgtccctctatgctgtgagg

SEQ ID NO: 515 - DNA, 23 bp, Homo sapiens
  source 1..23: mol_type = genomic DNA
ctttacaaaatgataaacccagg

SEQ ID NO: 516 - DNA, 23 bp, Homo sapiens
  source 1..23: mol_type = genomic DNA
tttccctaaactgaatgaggagg

SEQ ID NO: 517 - DNA, 23 bp, Homo sapiens
  source 1..23: mol_type = genomic DNA
aagtaaatcagtccatcacaagg

SEQ ID NO: 518 - DNA, 23 bp, Homo sapiens
  source 1..23: mol_type = genomic DNA
ataaggttgtgcttccagcatgg

SEQ ID NO: 519 - DNA, 23 bp, Homo sapiens
  source 1..23: mol_type = genomic DNA
gatagctaggctaattccaaggg

SEQ ID NO: 520 - DNA, 23 bp, Homo sapiens
  source 1..23: mol_type = genomic DNA
gcacattcacataactagagagg

SEQ ID NO: 521 - DNA, 23 bp, Homo sapiens
  source 1..23: mol_type = genomic DNA
gagaagccaaaatcatagcacgg

SEQ ID NO: 522 - DNA, 23 bp, Homo sapiens
  source 1..23: mol_type = genomic DNA
atggcaggaagatttattggggg

SEQ ID NO: 523 - DNA, 23 bp, Homo sapiens
  source 1..23: mol_type = genomic DNA
ctccaagctaaaaattcatgggg

SEQ ID NO: 524 - DNA, 23 bp, Homo sapiens
  source 1..23: mol_type = genomic DNA
ttctaaacacgtattctgtgagg

SEQ ID NO: 525 - DNA, 23 bp, Homo sapiens
  source 1..23: mol_type = genomic DNA
gttgggttaagcagtgacatggg

SEQ ID NO: 526 - DNA, 23 bp, Homo sapiens
  source 1..23: mol_type = genomic DNA
gccatctatttaataacacaagg

SEQ ID NO: 527 - DNA, 23 bp, Homo sapiens
  source 1..23: mol_type = genomic DNA
agcctgaaaatatagccagaggg

SEQ ID NO: 528 - DNA, 23 bp, Homo sapiens
  source 1..23: mol_type = genomic DNA
agtacctaaaagtgaacaggagg

SEQ ID NO: 529 - DNA, 23 bp, Homo sapiens
  source 1..23: mol_type = genomic DNA
tgaccatgcaaactttcaggagg

SEQ ID NO: 530 - DNA, 23 bp, Homo sapiens
  source 1..23: mol_type = genomic DNA
gagagaataaaataaaacgttgg

SEQ ID NO: 531 - DNA, 23 bp, Homo sapiens
  source 1..23: mol_type = genomic DNA
ttttcaaatttaagccagagggg

SEQ ID NO: 532 - DNA, 23 bp, Homo sapiens
  source 1..23: mol_type = genomic DNA
gggaagcttattgaagacagtgg

SEQ ID NO: 533 - DNA, 23 bp, Homo sapiens
  source 1..23: mol_type = genomic DNA
ccagtctcctccatagcctgagg

SEQ ID NO: 534 - DNA, 23 bp, Homo sapiens
  source 1..23: mol_type = genomic DNA
aaaaaaatacaatggtaaggggg

SEQ ID NO: 535 - DNA, 23 bp, Homo sapiens
  source 1..23: mol_type = genomic DNA
attaggctaatactggtctgtgg

SEQ ID NO: 536 - DNA, 23 bp, Homo sapiens
  source 1..23: mol_type = genomic DNA
ttcctcactaatgggaactgggg

SEQ ID NO: 537 - DNA, 23 bp, Homo sapiens
  source 1..23: mol_type = genomic DNA
tgaacctctgtgataacacttgg

SEQ ID NO: 538 - DNA, 23 bp, Homo sapiens
  source 1..23: mol_type = genomic DNA
ttatgaggcaaataatgaggagg

SEQ ID NO: 539 - DNA, 23 bp, Homo sapiens
  source 1..23: mol_type = genomic DNA
cagacagtgatgtttcatgtggg

SEQ ID NO: 540 - DNA, 23 bp, Homo sapiens
  source 1..23: mol_type = genomic DNA
ggtattacctgtaaaaaccaggg

SEQ ID NO: 541 - DNA, 23 bp, Homo sapiens
  source 1..23: mol_type = genomic DNA
gcatatggtatgtgctagcgtgg

SEQ ID NO: 542 - DNA, 23 bp, Homo sapiens
  source 1..23: mol_type = genomic DNA
tatcttcacatgctgtcatgggg

SEQ ID NO: 543 - DNA, 23 bp, Homo sapiens
  source 1..23: mol_type = genomic DNA
aaaatgttaagtactgagggtgg

SEQ ID NO: 544 - DNA, 23 bp, Homo sapiens
  source 1..23: mol_type = genomic DNA
agtttaaagtgtcttctcagtgg

SEQ ID NO: 545 - DNA, 23 bp, Homo sapiens
  source 1..23: mol_type = genomic DNA
aatgctacagtagtacagctggg

SEQ ID NO: 546 - DNA, 23 bp, Homo sapiens
  source 1..23: mol_type = genomic DNA
tgagagctagaagccgtgtgggg

SEQ ID NO: 547 - DNA, 23 bp, Homo sapiens
  source 1..23: mol_type = genomic DNA
atagtacaaagatgttcaggagg

SEQ ID NO: 548 - DNA, 23 bp, Homo sapiens
  source 1..23: mol_type = genomic DNA
taaacccacgaagagagaagagg

SEQ ID NO: 549 - DNA, 23 bp, Homo sapiens
  source 1..23: mol_type = genomic DNA
aacccaaactgacatgtaggagg

SEQ ID NO: 550 - DNA, 23 bp, Homo sapiens
  source 1..23: mol_type = genomic DNA
cacgcacaagagatgtggaaagg

SEQ ID NO: 551 - DNA, 23 bp, Homo sapiens
  source 1..23: mol_type = genomic DNA
tcacaatgggatgtacacttggg

SEQ ID NO: 552 - DNA, 23 bp, Homo sapiens
  source 1..23: mol_type = genomic DNA
gcagtgagaagaatatagagagg

SEQ ID NO: 553 - DNA, 23 bp, Homo sapiens
  source 1..23: mol_type = genomic DNA
tttggttccaggtaataaagtgg

SEQ ID NO: 554 - DNA, 23 bp, Homo sapiens
  source 1..23: mol_type = genomic DNA
actaacagactaatggaaggagg

SEQ ID NO: 555 - DNA, 23 bp, Homo sapiens
  source 1..23: mol_type = genomic DNA
tttagcacgcacaagagatgtgg

SEQ ID NO: 556 - DNA, 23 bp, Homo sapiens
  source 1..23: mol_type = genomic DNA
ctactgtgtctgatatgtggagg

SEQ ID NO: 557 - DNA, 23 bp, Homo sapiens
  source 1..23: mol_type = genomic DNA
tgaaaatagaaagtcccgcatgg

SEQ ID NO: 558 - DNA, 23 bp, Homo sapiens
  source 1..23: mol_type = genomic DNA
ccattattacaacactctagagg

SEQ ID NO: 559 - DNA, 23 bp, Homo sapiens
  source 1..23: mol_type = genomic DNA
atacacaagaatcttggcaaggg

SEQ ID NO: 560 - DNA, 23 bp, Homo sapiens
  source 1..23: mol_type = genomic DNA
ataacaataattaatactggtgg

SEQ ID NO: 561 - DNA, 23 bp, Homo sapiens
  source 1..23: mol_type = genomic DNA
tctgttttttccccaaattgcgg

SEQ ID NO: 562 - DNA, 23 bp, Homo sapiens
  source 1..23: mol_type = genomic DNA
ggttgattgtaaatgtcccaagg

SEQ ID NO: 563 - DNA, 23 bp, Homo sapiens
  source 1..23: mol_type = genomic DNA
gtggtcagcttacaatgaggagg

SEQ ID NO: 564 - DNA, 23 bp, Homo sapiens
  source 1..23: mol_type = genomic DNA
atacaatagactgcaaccaaagg

SEQ ID NO: 565 - DNA, 23 bp, Homo sapiens
  source 1..23: mol_type = genomic DNA
gtaaaactaacatttacctgtgg

SEQ ID NO: 566 - DNA, 23 bp, Homo sapiens
  source 1..23: mol_type = genomic DNA
taattgtttcagtagaacagtgg

SEQ ID NO: 567 - DNA, 23 bp, Homo sapiens
  source 1..23: mol_type = genomic DNA
gcttggcctcattagctctgggg

SEQ ID NO: 568 - DNA, 23 bp, Homo sapiens
  source 1..23: mol_type = genomic DNA
atcgtgtgtctatatttcagagg

SEQ ID NO: 569 - DNA, 23 bp, Homo sapiens
  source 1..23: mol_type = genomic DNA
aatatattacaacttcccgtggg

SEQ ID NO: 570 - DNA, 23 bp, Homo sapiens
  source 1..23: mol_type = genomic DNA
acgcacaaacataaaatcagagg

SEQ ID NO: 571 - DNA, 23 bp, Homo sapiens
  source 1..23: mol_type = genomic DNA
aatgcatgtacaaactaaggagg

SEQ ID NO: 572 - DNA, 23 bp, Homo sapiens
  source 1..23: mol_type = genomic DNA
tatttgaactccatgccagaggg

SEQ ID NO: 573 - DNA, 23 bp, Homo sapiens
  source 1..23: mol_type = genomic DNA
ctgaaaacaacgacgaagtgggg

SEQ ID NO: 574 - DNA, 23 bp, Homo sapiens
  source 1..23: mol_type = genomic DNA
ttatatgtaagtctcttcggtgg

SEQ ID NO: 575 - DNA, 23 bp, Homo sapiens
  source 1..23: mol_type = genomic DNA
ctgtgattttgtgaacacaatgg

SEQ ID NO: 576 - DNA, 23 bp, Homo sapiens
  source 1..23: mol_type = genomic DNA
gattgttctgataacccaagagg

SEQ ID NO: 577 - DNA, 23 bp, Homo sapiens
  source 1..23: mol_type = genomic DNA
gtggcacccatcttaatgagagg

SEQ ID NO: 578 - DNA, 23 bp, Homo sapiens
  source 1..23: mol_type = genomic DNA
taagttcaggagttttaacgtgg

SEQ ID NO: 579 - DNA, 23 bp, Homo sapiens
  source 1..23: mol_type = genomic DNA
cagatatattcctaggagggtgg

SEQ ID NO: 580 - DNA, 23 bp, Homo sapiens
  source 1..23: mol_type = genomic DNA
acacagtttggggattccagtgg

SEQ ID NO: 581 - DNA, 23 bp, Homo sapiens
  source 1..23: mol_type = genomic DNA
ccagccagttctctagactgagg

SEQ ID NO: 582 - DNA, 23 bp, Homo sapiens
  source 1..23: mol_type = genomic DNA
tgtctatgaaaaggagtaggagg

SEQ ID NO: 583 - DNA, 23 bp, Homo sapiens
  source 1..23: mol_type = genomic DNA
ccaaaacataaacattcacaggg

SEQ ID NO: 584 - DNA, 23 bp, Homo sapiens
  source 1..23: mol_type = genomic DNA
tagctataagtgatttaacaggg

SEQ ID NO: 585 - DNA, 23 bp, Homo sapiens
  source 1..23: mol_type = genomic DNA
ataaggtatttattaccactggg

SEQ ID NO: 586 - DNA, 23 bp, Homo sapiens
  source 1..23: mol_type = genomic DNA
gtttctcaaagaaagaccccagg

SEQ ID NO: 587 - DNA, 23 bp, Homo sapiens
  source 1..23: mol_type = genomic DNA
tatgaaatactttaacacccagg

SEQ ID NO: 588 - DNA, 23 bp, Homo sapiens
  source 1..23: mol_type = genomic DNA
agagattgattggttgacagtgg

SEQ ID NO: 589 - DNA, 23 bp, Homo sapiens
  source 1..23: mol_type = genomic DNA
acctacataaaaataaggggagg

SEQ ID NO: 590 - DNA, 23 bp, Homo sapiens
  source 1..23: mol_type = genomic DNA
attacacacaaaatagtggacgg

SEQ ID NO: 591 - DNA, 23 bp, Homo sapiens
  source 1..23: mol_type = genomic DNA
atgctcatctctaggtatggggg

SEQ ID NO: 592 - DNA, 23 bp, Homo sapiens
  source 1..23: mol_type = genomic DNA
ccattaccacaatagtccagtgg

SEQ ID NO: 593 - DNA, 23 bp, Homo sapiens
  source 1..23: mol_type = genomic DNA
tgtaaaggattaggtaactgagg

SEQ ID NO: 594 - DNA, 23 bp, Homo sapiens
  source 1..23: mol_type = genomic DNA
gagaaagtgtggaaagcactggg

SEQ ID NO: 595 - DNA, 23 bp, Homo sapiens
  source 1..23: mol_type = genomic DNA
accaacttgagagagaaggcggg

SEQ ID NO: 596 - DNA, 23 bp, Homo sapiens
  source 1..23: mol_type = genomic DNA
ttaaattaagacctctggggagg

SEQ ID NO: 597 - DNA, 23 bp, Homo sapiens
  source 1..23: mol_type = genomic DNA
acagttaactagaactgctgggg

SEQ ID NO: 598 - DNA, 23 bp, Homo sapiens
  source 1..23: mol_type = genomic DNA
agagccatgcaaatgagagtggg

SEQ ID NO: 599 - DNA, 23 bp, Homo sapiens
  source 1..23: mol_type = genomic DNA
taactcttaaccattttgagggg

SEQ ID NO: 600 - DNA, 23 bp, Homo sapiens
  source 1..23: mol_type = genomic DNA
agggaatatgaaacccccatagg

SEQ ID NO: 601 - DNA, 23 bp, Homo sapiens
  source 1..23: mol_type = genomic DNA
gcaaaaactcccaaatggtgagg

SEQ ID NO: 602 - DNA, 23 bp, Homo sapiens
  source 1..23: mol_type = genomic DNA
acatgttgtggaggaactgatgg

SEQ ID NO: 603 - DNA, 23 bp, Homo sapiens
  source 1..23: mol_type = genomic DNA
aattacatcaacaaaaatggagg

SEQ ID NO: 604 - DNA, 23 bp, Homo sapiens
  source 1..23: mol_type = genomic DNA
taaagcacttcagaagacacagg

SEQ ID NO: 605 - DNA, 23 bp, Homo sapiens
  source 1..23: mol_type = genomic DNA
cttagcataaccataacctaggg

SEQ ID NO: 606 - DNA, 23 bp, Homo sapiens
  source 1..23: mol_type = genomic DNA
gaaatgtctaaaaattctggagg

SEQ ID NO: 607 - DNA, 23 bp, Homo sapiens
  source 1..23: mol_type = genomic DNA
gggcattgcaccttgcacaaagg

SEQ ID NO: 608 - DNA, 23 bp, Homo sapiens
  source 1..23: mol_type = genomic DNA
gaaagaattgagacattactggg

SEQ ID NO: 609 - DNA, 23 bp, Homo sapiens
  source 1..23: mol_type = genomic DNA
gggtatggagtggatcaacatgg

SEQ ID NO: 610 - DNA, 23 bp, Homo sapiens
  source 1..23: mol_type = genomic DNA
catcttcatagactttatggagg

SEQ ID NO: 611 - DNA, 23 bp, Homo sapiens
  source 1..23: mol_type = genomic DNA
tcaaaagctagaaattgatgagg

SEQ ID NO: 612 - DNA, 23 bp, Homo sapiens
  source 1..23: mol_type = genomic DNA
tcctatatactagagccagaagg

SEQ ID NO: 613 - DNA, 23 bp, Homo sapiens
  source 1..23: mol_type = genomic DNA
tctagtggagcagtaactgaggg

SEQ ID NO: 614 - DNA, 23 bp, Homo sapiens
  source 1..23: mol_type = genomic DNA
atatatttcggagacccagtagg

SEQ ID NO: 615 - DNA, 23 bp, Homo sapiens
  source 1..23: mol_type = genomic DNA
tatccctgagagtatatgagtgg

SEQ ID NO: 616 - DNA, 23 bp, Homo sapiens
  source 1..23: mol_type = genomic DNA
gctacaataattgttctgagagg

SEQ ID NO: 617 - DNA, 23 bp, Homo sapiens
  source 1..23: mol_type = genomic DNA
cctttaaatgagcacaactgggg

SEQ ID NO: 618 - DNA, 23 bp, Homo sapiens
  source 1..23: mol_type = genomic DNA
cattgagcacactctacaagggg

SEQ ID NO: 619 - DNA, 23 bp, Homo sapiens
  source 1..23: mol_type = genomic DNA
gcataactctctcagtccaaagg

SEQ ID NO: 620 - DNA, 23 bp, Homo sapiens
  source 1..23: mol_type = genomic DNA
tctagtcctcagcatcatcaggg

SEQ ID NO: 621 - DNA, 23 bp, Homo sapiens
  source 1..23: mol_type = genomic DNA
aagattaaacatgaacctgtggg

SEQ ID NO: 622 - DNA, 23 bp, Homo sapiens
  source 1..23: mol_type = genomic DNA
aattatagggataaacacccagg

SEQ ID NO: 623 - DNA, 23 bp, Homo sapiens
  source 1..23: mol_type = genomic DNA
ttattccaatcctagagtggagg

SEQ ID NO: 624 - DNA, 23 bp, Homo sapiens
  source 1..23: mol_type = genomic DNA
acgtaatgatgtcaaccagtagg

SEQ ID NO: 625 - DNA, 23 bp, Homo sapiens
  source 1..23: mol_type = genomic DNA
cagtgaagatgagcaacaggtgg

SEQ ID NO: 626 - DNA, 23 bp, Homo sapiens
  source 1..23: mol_type = genomic DNA
tttctcagttggtatctctgggg

SEQ ID NO: 627 - DNA, 23 bp, Homo sapiens
  source 1..23: mol_type = genomic DNA
tactgtataaaaataaaccaagg

SEQ ID NO: 628 - DNA, 23 bp, Homo sapiens
  source 1..23: mol_type = genomic DNA
ttttcataaatgaattactgggg

SEQ ID NO: 629 - DNA, 23 bp, Homo sapiens
  source 1..23: mol_type = genomic DNA
ttttttaaattatattcacaagg

SEQ ID NO: 630 - DNA, 23 bp, Homo sapiens
  source 1..23: mol_type = genomic DNA
tgtaagccacaagtgtaatgggg

SEQ ID NO: 631 - DNA, 23 bp, Homo sapiens
  source 1..23: mol_type = genomic DNA
atatttttcctagaaaagcgtgg

SEQ ID NO: 632 - DNA, 23 bp, Homo sapiens
  source 1..23: mol_type = genomic DNA
gtctgataaaaccataacaaggg

SEQ ID NO: 633 - DNA, 23 bp, Homo sapiens
  source 1..23: mol_type = genomic DNA
accctacgcataagagcaggtgg

SEQ ID NO: 634 - DNA, 23 bp, Homo sapiens
  source 1..23: mol_type = genomic DNA
gctacatactgtaatcactcagg

SEQ ID NO: 635 - DNA, 23 bp, Homo sapiens
  source 1..23: mol_type = genomic DNA
gataatacctacataatactggg

SEQ ID NO: 636 - DNA, 23 bp, Homo sapiens
  source 1..23: mol_type = genomic DNA
gagagctagaagccgtgtggggg

SEQ ID NO: 637 - DNA, 23 bp, Homo sapiens
  source 1..23: mol_type = genomic DNA
aaagcatgtatgtaattgggagg

SEQ ID NO: 638 - DNA, 23 bp, Homo sapiens
  source 1..23: mol_type = genomic DNA
ataggcaataatattatgtgagg

SEQ ID NO: 639 - DNA, 23 bp, Homo sapiens
  source 1..23: mol_type = genomic DNA
tattattttatagttcaaagggg

SEQ ID NO: 640 - DNA, 23 bp, Homo sapiens
  source 1..23: mol_type = genomic DNA
cttgccatggaaaaaaatggtgg

SEQ ID NO: 641 - DNA, 23 bp, Homo sapiens
  source 1..23: mol_type = genomic DNA
tctgtgcccttgaaggctagagg

SEQ ID NO: 642 - DNA, 23 bp, Homo sapiens
  source 1..23: mol_type = genomic DNA
ctagttgattatgatccccaagg

SEQ ID NO: 643 - DNA, 23 bp, Homo sapiens
  source 1..23: mol_type = genomic DNA
cgacagacaccaaatgccaatgg

SEQ ID NO: 644 - DNA, 23 bp, Homo sapiens
  source 1..23: mol_type = genomic DNA
gatcttacttgatactaccacgg

SEQ ID NO: 645 - DNA, 23 bp, Homo sapiens
  source 1..23: mol_type = genomic DNA
ctattggcaatgtacactgaggg

SEQ ID NO: 646 - DNA, 23 bp, Homo sapiens
  source 1..23: mol_type = genomic DNA
tactaaactctaccacccatggg

SEQ ID NO: 647 - DNA, 23 bp, Homo sapiens
  source 1..23: mol_type = genomic DNA
gctagaacccagctaagagaggg

SEQ ID NO: 648 - DNA, 23 bp, Homo sapiens
  source 1..23: mol_type = genomic DNA
cccagatctgagtcctgtagggg

SEQ ID NO: 649 - DNA, 23 bp, Homo sapiens
  source 1..23: mol_type = genomic DNA
catgtcatatgctttcccatggg

SEQ ID NO: 650 - DNA, 23 bp, Homo sapiens
  source 1..23: mol_type = genomic DNA
aggcaaaggctacattgcgtagg

SEQ ID NO: 651 - DNA, 23 bp, Homo sapiens
  source 1..23: mol_type = genomic DNA
gattatagaagtttacattgggg

SEQ ID NO: 652 - DNA, 23 bp, Homo sapiens
  source 1..23: mol_type = genomic DNA
ctgatgccaggattctgtagagg

SEQ ID NO: 653 - DNA, 23 bp, Homo sapiens
  source 1..23: mol_type = genomic DNA
actgttcgctcaagaagtaaggg

SEQ ID NO: 654 - DNA, 23 bp, Homo sapiens
  source 1..23: mol_type = genomic DNA
aatgctatgtgagataggaaagg

SEQ ID NO: 655 - DNA, 23 bp, Homo sapiens
  source 1..23: mol_type = genomic DNA
aaaatgtgaatagttctgagagg

SEQ ID NO: 656 - DNA, 23 bp, Homo sapiens
  source 1..23: mol_type = genomic DNA
aataaaatagagaaaagactagg

SEQ ID NO: 657 - DNA, 23 bp, Homo sapiens
  source 1..23: mol_type = genomic DNA
gcacttaagatgttagagggagg

SEQ ID NO: 658 - DNA, 23 bp, Homo sapiens
  source 1..23: mol_type = genomic DNA
cgagacatagtctctgccaatgg

SEQ ID NO: 659 - DNA, 23 bp, Homo sapiens
  source 1..23: mol_type = genomic DNA
aaatcaagcaacactcacacggg

SEQ ID NO: 660 - DNA, 23 bp, Homo sapiens
  source 1..23: mol_type = genomic DNA
tgttaaacatcaatagagggagg

SEQ ID NO: 661 - DNA, 23 bp, Homo sapiens
  source 1..23: mol_type = genomic DNA
caatactattaacaaccccaggg

SEQ ID NO: 662 - DNA, 23 bp, Homo sapiens
  source 1..23: mol_type = genomic DNA
tgagcaggggaagacactatcgg

SEQ ID NO: 663 - DNA, 23 bp, Homo sapiens
  source 1..23: mol_type = genomic DNA
gaaattctcagataatctcaggg

SEQ ID NO: 664 - DNA, 23 bp, Homo sapiens
  source 1..23: mol_type = genomic DNA
ttagccttggaagctgtgtgagg

SEQ ID NO: 665 - DNA, 23 bp, Homo sapiens
  source 1..23: mol_type = genomic DNA
tccgttacacgtttacaaagggg

SEQ ID NO: 666 - DNA, 23 bp, Homo sapiens
  source 1..23: mol_type = genomic DNA
cttgccccaatgccattgtgcgg

SEQ ID NO: 667 - DNA, 23 bp, Homo sapiens
  source 1..23: mol_type = genomic DNA
aaaatggcagtgcagagtggagg

SEQ ID NO: 668 - DNA, 23 bp, Homo sapiens
  source 1..23: mol_type = genomic DNA
tctaccaatgccgggctccgggg

SEQ ID NO: 669 - DNA, 23 bp, Homo sapiens
  source 1..23: mol_type = genomic DNA
aattctgctgaaattaagcaagg

SEQ ID NO: 670 - DNA, 23 bp, Homo sapiens
  source 1..23: mol_type = genomic DNA
agtgtttagtcatatagcagagg

SEQ ID NO: 671 - DNA, 23 bp, Homo sapiens
  source 1..23: mol_type = genomic DNA
gactagatgaccatcagagacgg

SEQ ID NO: 672 - DNA, 23 bp, Homo sapiens
  source 1..23: mol_type = genomic DNA
gaatagaaaaagtcttacaaagg

SEQ ID NO: 673 - DNA, 23 bp, Homo sapiens
  source 1..23: mol_type = genomic DNA
ctatttgaactccatgccagagg

SEQ ID NO: 674 - DNA, 23 bp, Homo sapiens
  source 1..23: mol_type = genomic DNA
gtatttttttaaattttcagggg

SEQ ID NO: 675 - DNA, 23 bp, Homo sapiens
  source 1..23: mol_type = genomic DNA
ataatacatgccaagagggtagg

SEQ ID NO: 676 - DNA, 23 bp, Homo sapiens
  source 1..23: mol_type = genomic DNA
gtttcccacacacctctggaagg

SEQ ID NO: 677 - DNA, 23 bp, Homo sapiens
  source 1..23: mol_type = genomic DNA
atcgtcttccaagagtgtgtggg

SEQ ID NO: 678 - DNA, 23 bp, Homo sapiens
  source 1..23: mol_type = genomic DNA
acagttagccatccttagagtgg

SEQ ID NO: 679 - DNA, 23 bp, Homo sapiens
  source 1..23: mol_type = genomic DNA
tccggttgccgtgaatagtgagg

SEQ ID NO: 680 - DNA, 23 bp, Homo sapiens
  source 1..23: mol_type = genomic DNA
tccatgtcctagctcgagggcgg

SEQ ID NO: 681 - DNA, 23 bp, Homo sapiens
  source 1..23: mol_type = genomic DNA
atcatcgctgagaaaaggcaagg

SEQ ID NO: 682 - DNA, 23 bp, Homo sapiens
  source 1..23: mol_type = genomic DNA
gtatcttgaccctctctcagtgg

SEQ ID NO: 683 - DNA, 23 bp, Homo sapiens
  source 1..23: mol_type = genomic DNA
ttgtcaagttaccatgcccgtgg

SEQ ID NO: 684 - DNA, 23 bp, Homo sapiens
  source 1..23: mol_type = genomic DNA
tcatgtagcaaggagtgcagagg

SEQ ID NO: 685 - DNA, 23 bp, Homo sapiens
  source 1..23: mol_type = genomic DNA
acatcgttagaagacagtaaagg

SEQ ID NO: 686 - DNA, 23 bp, Homo sapiens
  source 1..23: mol_type = genomic DNA
catttatacagaagacccacggg

SEQ ID NO: 687 - DNA, 23 bp, Homo sapiens
  source 1..23: mol_type = genomic DNA
tttgaatgtctggtattgagtgg

SEQ ID NO: 688 - DNA, 23 bp, Homo sapiens
  source 1..23: mol_type = genomic DNA
gtaattaaaagtgctttaggggg

SEQ ID NO: 689 - DNA, 23 bp, Homo sapiens
  source 1..23: mol_type = genomic DNA
cacagaaatagcaatatgggagg

SEQ ID NO: 690 - DNA, 23 bp, Homo sapiens
  source 1..23: mol_type = genomic DNA
aataatgtcagagatcgtgatgg

SEQ ID NO: 691 - DNA, 23 bp, Homo sapiens
  source 1..23: mol_type = genomic DNA
tcatgtatcagtagctttggggg

SEQ ID NO: 692 - DNA, 23 bp, Homo sapiens
  source 1..23: mol_type = genomic DNA
tgttccataagtattgggcacgg

SEQ ID NO: 693 - DNA, 23 bp, Homo sapiens
  source 1..23: mol_type = genomic DNA
ctgatgtttatacaatgccaagg

SEQ ID NO: 694 - DNA, 23 bp, Homo sapiens
  source 1..23: mol_type = genomic DNA
tttgaacacatcgaggcaggtgg

SEQ ID NO: 695 - DNA, 23 bp, Homo sapiens
  source 1..23: mol_type = genomic DNA
actgacctctaaaacttaggggg

SEQ ID NO: 696 - DNA, 23 bp, Homo sapiens
  source 1..23: mol_type = genomic DNA
ccatttcccagggaaccagtcgg

SEQ ID NO: 697 - DNA, 23 bp, Homo sapiens
  source 1..23: mol_type = genomic DNA
gctcttcaaagcaacatctgtgg

SEQ ID NO: 698 - DNA, 23 bp, Homo sapiens
  source 1..23: mol_type = genomic DNA
ttaatgttagttgtttgccccgg

SEQ ID NO: 699 - DNA, 23 bp, Homo sapiens
  source 1..23: mol_type = genomic DNA
gcctgtgcataccagatctgtgg

SEQ ID NO: 700 - DNA, 23 bp, Homo sapiens
  source 1..23: mol_type = genomic DNA
aatgatactgggcaaactgaggg

SEQ ID NO: 701 - DNA, 23 bp, Homo sapiens
  source 1..23: mol_type = genomic DNA
aaatatgcatgatatttgtgggg

SEQ ID NO: 702 - DNA, 23 bp, Homo sapiens
  source 1..23: mol_type = genomic DNA
gaatgactctcagcctagggtgg

SEQ ID NO: 703 - DNA, 23 bp, Homo sapiens
  source 1..23: mol_type = genomic DNA
tattgttaaacatcaatagaggg

SEQ ID NO: 704 - DNA, 23 bp, Homo sapiens
  source 1..23: mol_type = genomic DNA
gggaccgaatagacaatgcaagg

SEQ ID NO: 705 - DNA, 23 bp, Homo sapiens
  source 1..23: mol_type = genomic DNA
gtaacacgggtgacaaatgtggg

SEQ ID NO: 706 - DNA, 23 bp, Homo sapiens
  source 1..23: mol_type = genomic DNA
gtcttctatggcaaaccatgggg

SEQ ID NO: 707 - DNA, 23 bp, Homo sapiens
  source 1..23: mol_type = genomic DNA
ttgacacccgtagcctatggggg

SEQ ID NO: 708 - DNA, 23 bp, Homo sapiens
  source 1..23: mol_type = genomic DNA
tgactggactattcttacaaggg

SEQ ID NO: 709 - DNA, 23 bp, Homo sapiens
  source 1..23: mol_type = genomic DNA
ccctcctaggaatatatctgtgg

SEQ ID NO: 710 - DNA, 23 bp, Homo sapiens
  source 1..23: mol_type = genomic DNA
tttcgttgacccttaactagggg

SEQ ID NO: 711 - DNA, 23 bp, Homo sapiens
  source 1..23: mol_type = genomic DNA
cttgaaaattcaaatccacaggg

SEQ ID NO: 712 - DNA, 23 bp, Homo sapiens
  source 1..23: mol_type = genomic DNA
tagagggagataaaggaaggggg

SEQ ID NO: 713 - DNA, 23 bp, Homo sapiens
  source 1..23: mol_type = genomic DNA
ctaaacactgagccatgaggtgg

SEQ ID NO: 714 - DNA, 23 bp, Homo sapiens
  source 1..23: mol_type = genomic DNA
gtagataattataactcaggagg

SEQ ID NO: 715 - DNA, 23 bp, Homo sapiens
  source 1..23: mol_type = genomic DNA
gtgattagaaggcattacatggg

SEQ ID NO: 716 - DNA, 23 bp, Homo sapiens
  source 1..23: mol_type = genomic DNA
ggtacctgagggatctgtgaggg

SEQ ID NO: 717 - DNA, 23 bp, Homo sapiens
  source 1..23: mol_type = genomic DNA
actgaggttactgattagaaggg

SEQ ID NO: 718 - DNA, 23 bp, Homo sapiens
  source 1..23: mol_type = genomic DNA
gatcagtgaaatttacattgggg

SEQ ID NO: 719 - DNA, 23 bp, Homo sapiens
  source 1..23: mol_type = genomic DNA
aggcaaagtgtcctctagggtgg

SEQ ID NO: 720 - DNA, 23 bp, Homo sapiens
  source 1..23: mol_type = genomic DNA
acagatgaattcaacacacccgg

SEQ ID NO: 721 - DNA, 23 bp, Homo sapiens
  source 1..23: mol_type = genomic DNA
ccaaatcccctacattctcaggg

SEQ ID NO: 722 - DNA, 23 bp, Homo sapiens
  source 1..23: mol_type = genomic DNA
tcagggataaaattctgtagagg

SEQ ID NO: 723 - DNA, 23 bp, Homo sapiens
  source 1..23: mol_type = genomic DNA
ggagtgataacatattgcactgg

SEQ ID NO: 724 - DNA, 23 bp, Homo sapiens
  source 1..23: mol_type = genomic DNA
tcaatattctagacatagtgggg

SEQ ID NO: 725 - DNA, 23 bp, Homo sapiens
  source 1..23: mol_type = genomic DNA
atagtgctgggaatgccagaggg

SEQ ID NO: 726 - DNA, 23 bp, Homo sapiens
  source 1..23: mol_type = genomic DNA
gtcacaaccctagaaatgggagg

SEQ ID NO: 727 - DNA, 23 bp, Homo sapiens
  source 1..23: mol_type = genomic DNA
aggctaatactggtctgtggcgg

SEQ ID NO: 728 - DNA, 23 bp, Homo sapiens
  source 1..23: mol_type = genomic DNA
atttttaaaggtgtgtctggagg

SEQ ID NO: 729 - DNA, 23 bp, Homo sapiens
  source 1..23: mol_type = genomic DNA
tatatcagtaactttaaatgggg

SEQ ID NO: 730 - DNA, 23 bp, Homo sapiens
  source 1..23: mol_type = genomic DNA
tattgcacagttacatctcaggg

SEQ ID NO: 731 - DNA, 23 bp, Homo sapiens
  source 1..23: mol_type = genomic DNA
gtacaaatgtaggtatgaggagg

SEQ ID NO: 732 - DNA, 23 bp, Homo sapiens
  source 1..23: mol_type = genomic DNA
actattcacggcaaccggagtgg

SEQ ID NO: 733 - DNA, 23 bp, Homo sapiens
  source 1..23: mol_type = genomic DNA
ttcatcctaaggtcaataggagg

SEQ ID NO: 734 - DNA, 23 bp, Homo sapiens
  source 1..23: mol_type = genomic DNA
tcaaaagagaaagaatcacttgg

SEQ ID NO: 735 - DNA, 23 bp, Homo sapiens
  source 1..23: mol_type = genomic DNA
tctagggagtgcatgaacaaagg

SEQ ID NO: 736 - DNA, 23 bp, Homo sapiens
  source 1..23: mol_type = genomic DNA
ccaaataataagtagaaccaggg

SEQ ID NO: 737 - DNA, 23 bp, Homo sapiens
  source 1..23: mol_type = genomic DNA
acaacttttgaccagtagcgagg

SEQ ID NO: 738 - DNA, 23 bp, Homo sapiens
  source 1..23: mol_type = genomic DNA
gaccaaccgcttcaccacaccgg

SEQ ID NO: 739 - DNA, 23 bp, Homo sapiens
  source 1..23: mol_type = genomic DNA
gcaagcacatcattactgaaagg

SEQ ID NO: 740 - DNA, 23 bp, Homo sapiens
  source 1..23: mol_type = genomic DNA
tgcgtcaagatgcatcatgaggg

SEQ ID NO: 741 - DNA, 23 bp, Homo sapiens
  source 1..23: mol_type = genomic DNA
tgaatgctataggaataaagagg

SEQ ID NO: 742 - DNA, 23 bp, Homo sapiens
  source 1..23: mol_type = genomic DNA
cagcgtgaaaaaatcctacaggg

SEQ ID NO: 743 - DNA, 23 bp, Homo sapiens
  source 1..23: mol_type = genomic DNA
accactaacgtcacctcaggcgg

SEQ ID NO: 744 - DNA, 23 bp, Homo sapiens
  source 1..23: mol_type = genomic DNA
agttgatcatcacatgcttgtgg

SEQ ID NO: 745 - DNA, 23 bp, Homo sapiens
  source 1..23: mol_type = genomic DNA
tggcaccaaagattataagccgg

SEQ ID NO: 746 - DNA, 23 bp, Homo sapiens
  source 1..23: mol_type = genomic DNA
ataggcagttcaactaagggcgg

SEQ ID NO: 747 - DNA, 23 bp, Homo sapiens
  source 1..23: mol_type = genomic DNA
tgacaccagctggacatcagagg

SEQ ID NO: 748 - DNA, 23 bp, Homo sapiens
  source 1..23: mol_type = genomic DNA
aaacgctgtactcatctagaggg

SEQ ID NO: 749 - DNA, 23 bp, Homo sapiens
  source 1..23: mol_type = genomic DNA
ttataatctttggtgccagtagg

SEQ ID NO: 750 - DNA, 23 bp, Homo sapiens
  source 1..23: mol_type = genomic DNA
aagagtaatcatatccctaaggg

SEQ ID NO: 751 - DNA, 23 bp, Homo sapiens
  source 1..23: mol_type = genomic DNA
aaatggattgaatttagaggagg

SEQ ID NO: 752 - DNA, 23 bp, Homo sapiens
  source 1..23: mol_type = genomic DNA
gatggcctgtgaatagctgtcgg

SEQ ID NO: 753 - DNA, 23 bp, Homo sapiens
  source 1..23: mol_type = genomic DNA
tctgcgtgcattttttccagcgg

SEQ ID NO: 754 - DNA, 23 bp, Homo sapiens
  source 1..23: mol_type = genomic DNA
cagttttctaccatagacaaggg

SEQ ID NO: 755 - DNA, 23 bp, Homo sapiens
  source 1..23: mol_type = genomic DNA
tagatctgaaaagtaaggaacgg

SEQ ID NO: 756 - DNA, 23 bp, Homo sapiens
  source 1..23: mol_type = genomic DNA
cattaccacaatagtccagtggg

SEQ ID NO: 757 - DNA, 23 bp, Homo sapiens
  source 1..23: mol_type = genomic DNA
gtaacattaattaagaaccctgg

SEQ ID NO: 758 - DNA, 23 bp, Homo sapiens
  source 1..23: mol_type = genomic DNA
tactgacctctaaaacttagggg

SEQ ID NO: 759 - DNA, 23 bp, Homo sapiens
  source 1..23: mol_type = genomic DNA
gcatgcaagagaatcaatagagg

SEQ ID NO: 760 - DNA, 23 bp, Homo sapiens
  source 1..23: mol_type = genomic DNA
gaaaaggaaacactactccaagg

SEQ ID NO: 761 - DNA, 23 bp, Homo sapiens
  source 1..23: mol_type = genomic DNA
tcaccactcatatactctcaggg

SEQ ID NO: 762 - DNA, 23 bp, Homo sapiens
  source 1..23: mol_type = genomic DNA
gtcggtgcttgagaaggtcatgg

SEQ ID NO: 763 - DNA, 23 bp, Homo sapiens
  source 1..23: mol_type = genomic DNA
agaaggagactgatttcccaagg

SEQ ID NO: 764 - DNA, 23 bp, Homo sapiens
  source 1..23: mol_type = genomic DNA
agcatgagtttccttccaagtgg

SEQ ID NO: 765 - DNA, 23 bp, Homo sapiens
  source 1..23: mol_type = genomic DNA
gagtattaacaataacacaatgg

SEQ ID NO: 766 - DNA, 23 bp, Homo sapiens
  source 1..23: mol_type = genomic DNA
ggcatctgagtgaaatatgtggg

SEQ ID NO: 767 - DNA, 23 bp, Homo sapiens
  source 1..23: mol_type = genomic DNA
catagtgctgggaatgccagagg

SEQ ID NO: 768 - DNA, 23 bp, Homo sapiens
  source 1..23: mol_type = genomic DNA
gtgaccaagcctcttgagagagg

SEQ ID NO: 769 - DNA, 23 bp, Homo sapiens
  source 1..23: mol_type = genomic DNA
cctcagtctagagaactggctgg

SEQ ID NO: 770 - DNA, 23 bp, Homo sapiens
  source 1..23: mol_type = genomic DNA
ggagtcattaactttagtggagg

SEQ ID NO: 771 - DNA, 23 bp, Homo sapiens
  source 1..23: mol_type = genomic DNA
ccaacacctaattaatgacaggg

SEQ ID NO: 772 - DNA, 23 bp, Homo sapiens
  source 1..23: mol_type = genomic DNA
acctgttgtaaaatatcgagagg

SEQ ID NO: 773 - DNA, 23 bp, Homo sapiens
  source 1..23: mol_type = genomic DNA
tatacttaatctgtatgccacgg

SEQ ID NO: 774 - DNA, 23 bp, Homo sapiens
  source 1..23: mol_type = genomic DNA
tactttttaaattctcagtgagg

SEQ ID NO: 775 - DNA, 23 bp, Homo sapiens
  source 1..23: mol_type = genomic DNA
gcagagagaagacagataggtgg

SEQ ID NO: 776 - DNA, 23 bp, Homo sapiens
  source 1..23: mol_type = genomic DNA
gagatgcaggaatatttgcaagg

SEQ ID NO: 777 - DNA, 23 bp, Homo sapiens
  source 1..23: mol_type = genomic DNA
gctgccactacaaaagaatgagg

SEQ ID NO: 778 - DNA, 23 bp, Homo sapiens
  source 1..23: mol_type = genomic DNA
gaagtgctttttatcccagacgg

SEQ ID NO: 779 - DNA, 23 bp, Homo sapiens
  source 1..23: mol_type = genomic DNA
ataagtaaggaatcaaggtgagg

SEQ ID NO: 780 - DNA, 23 bp, Homo sapiens
  source 1..23: mol_type = genomic DNA
gtaaatgcaataatgatatgggg

SEQ ID NO: 781 - DNA, 23 bp, Homo sapiens
  source 1..23: mol_type = genomic DNA
acaatatttagcaattacacagg

SEQ ID NO: 782 - DNA, 23 bp, Homo sapiens
  source 1..23: mol_type = genomic DNA
tctatttgttagatgacacaggg

SEQ ID NO: 783 - DNA, 23 bp, Homo sapiens
  source 1..23: mol_type = genomic DNA
taaatatgaaaaccatacatggg

SEQ ID NO: 784 - DNA, 23 bp, Homo sapiens
  source 1..23: mol_type = genomic DNA
actatgcccgtacataaacctgg

SEQ ID NO: 785 - DNA, 23 bp, Homo sapiens
  source 1..23: mol_type = genomic DNA
aattactaatgaaagttgggagg

SEQ ID NO: 786 - DNA, 23 bp, Homo sapiens
  source 1..23: mol_type = genomic DNA
atccttaacttggagtccagtgg

SEQ ID NO: 787 - DNA, 23 bp, Homo sapiens
  source 1..23: mol_type = genomic DNA
gcaaagctcctattgtgggaagg

SEQ ID NO: 788 - DNA, 23 bp, Homo sapiens
  source 1..23: mol_type = genomic DNA
acaaagtctattgtgatcagtgg

SEQ ID NO: 789 - DNA, 23 bp, Homo sapiens
  source 1..23: mol_type = genomic DNA
ccaattcccctcctctagggagg

SEQ ID NO: 790 - DNA, 23 bp, Homo sapiens
  source 1..23: mol_type = genomic DNA
gcagaccagagtaaataactagg

SEQ ID NO: 791 - DNA, 23 bp, Homo sapiens
  source 1..23: mol_type = genomic DNA
attcttattgtatttccatgagg

SEQ ID NO: 792 - DNA, 23 bp, Homo sapiens
  source 1..23: mol_type = genomic DNA
tttgctaaggcagctcagaaggg

SEQ ID NO: 793 - DNA, 23 bp, Homo sapiens
  source 1..23: mol_type = genomic DNA
gagagcttgacactgcatgcagg

SEQ ID NO: 794 - DNA, 23 bp, Homo sapiens
  source 1..23: mol_type = genomic DNA
gccaaattgatgcaaagtggtgg

SEQ ID NO: 795 - DNA, 23 bp, Homo sapiens
  source 1..23: mol_type = genomic DNA
tctcagctaagggacgacatagg

SEQ ID NO: 796 - DNA, 23 bp, Homo sapiens
  source 1..23: mol_type = genomic DNA
gcatgtttatcagtgttacacgg

SEQ ID NO: 797 - DNA, 23 bp, Homo sapiens
  source 1..23: mol_type = genomic DNA
ggaaatggtgggttttccagtgg

SEQ ID NO: 798 - DNA, 23 bp, Homo sapiens
  source 1..23: mol_type = genomic DNA
actacatactgaaggatttgggg

SEQ ID NO: 799 - DNA, 23 bp, Homo sapiens
  source 1..23: mol_type = genomic DNA
tagggccctagaaacctccaagg

SEQ ID NO: 800 - DNA, 23 bp, Homo sapiens
  source 1..23: mol_type = genomic DNA
gggaatccttctgatacagaagg

SEQ ID NO: 801 - DNA, 23 bp, Homo sapiens
  source 1..23: mol_type = genomic DNA
ctctaggattggaataacacagg

SEQ ID NO: 802 - DNA, 23 bp, Homo sapiens
  source 1..23: mol_type = genomic DNA
taatcagctgtctataccagtgg

SEQ ID NO: 803 - DNA, 23 bp, Homo sapiens
  source 1..23: mol_type = genomic DNA
tcgtcacctactcccttgaaagg

SEQ ID NO: 804 - DNA, 23 bp, Homo sapiens
  source 1..23: mol_type = genomic DNA
agagtacaagaagtaatcaaggg

SEQ ID NO: 805 - DNA, 23 bp, Homo sapiens
  source 1..23: mol_type = genomic DNA
atactaatagaagacaaactagg

SEQ ID NO: 806 - DNA, 23 bp, Homo sapiens
  source 1..23: mol_type = genomic DNA
ctatggttagtaatattagaggg

SEQ ID NO: 807 - DNA, 23 bp, Homo sapiens
  source 1..23: mol_type = genomic DNA
tctgtaataaaaagtatgggtgg

SEQ ID NO: 808 - DNA, 23 bp, Homo sapiens
  source 1..23: mol_type = genomic DNA
gcagaaataattccatgatgcgg

SEQ ID NO: 809 - DNA, 23 bp, Homo sapiens
  source 1..23: mol_type = genomic DNA
agaagctatctgattactggagg

SEQ ID NO: 810 - DNA, 23 bp, Homo sapiens
  source 1..23: mol_type = genomic DNA
tgcaaagtctgccagcacacagg

SEQ ID NO: 811 - DNA, 23 bp, Homo sapiens
  source 1..23: mol_type = genomic DNA
ttgtggttatctgatacaggtgg

SEQ ID NO: 812 - DNA, 23 bp, Homo sapiens
  source 1..23: mol_type = genomic DNA
agtatgcagattttaagtggtgg

SEQ ID NO: 813 - DNA, 23 bp, Homo sapiens
  source 1..23: mol_type = genomic DNA
cgttgtgaaagaaatttccaggg

SEQ ID NO: 814 - DNA, 23 bp, Homo sapiens
  source 1..23: mol_type = genomic DNA
atatgtaacacattaaaatgtgg

SEQ ID NO: 815 - DNA, 23 bp, Homo sapiens
  source 1..23: mol_type = genomic DNA
gttttaaacaagactttaggcgg

SEQ ID NO: 816 - DNA, 23 bp, Homo sapiens
  source 1..23: mol_type = genomic DNA
tattgttggaggtttcctgaagg

SEQ ID NO: 817 - DNA, 23 bp, Homo sapiens
  source 1..23: mol_type = genomic DNA
cattgtatatataatagagaagg

SEQ ID NO: 818 - DNA, 23 bp, Homo sapiens
  source 1..23: mol_type = genomic DNA
ttttgagtgactttttgtagagg

SEQ ID NO: 819 - DNA, 23 bp, Homo sapiens
  source 1..23: mol_type = genomic DNA
ctcttcagaaagatgagcagggg

SEQ ID NO: 820 - DNA, 23 bp, Homo sapiens
  source 1..23: mol_type = genomic DNA
tactcagattcaaaagagagagg

SEQ ID NO: 821 - DNA, 23 bp, Homo sapiens
  source 1..23: mol_type = genomic DNA
tgtctgataaaaccataacaagg

SEQ ID NO: 822 - DNA, 23 bp, Homo sapiens
  source 1..23: mol_type = genomic DNA
tcacgccttggcctaaacaaggg

SEQ ID NO: 823 - DNA, 23 bp, Homo sapiens
  source 1..23: mol_type = genomic DNA
aatgcaggtcaaaagtgtgtggg

SEQ ID NO: 824 - DNA, 23 bp, Homo sapiens
  source 1..23: mol_type = genomic DNA
gggaaattggaacaacaggaagg

SEQ ID NO: 825 - DNA, 23 bp, Homo sapiens
  source 1..23: mol_type = genomic DNA
acatagcatttgtgagtgaaggg

SEQ ID NO: 826 - DNA, 23 bp, Homo sapiens
  source 1..23: mol_type = genomic DNA
gaagtgtgaataaaagttagggg

SEQ ID NO: 827 - DNA, 23 bp, Homo sapiens
  source 1..23: mol_type = genomic DNA
cccaacagtctaataacgatagg

SEQ ID NO: 828 - DNA, 23 bp, Homo sapiens
  source 1..23: mol_type = genomic DNA
cagtgagaagaatatagagaggg

SEQ ID NO: 829 - DNA, 23 bp, Homo sapiens
  source 1..23: mol_type = genomic DNA
tgcattggcagtgacagcggagg

SEQ ID NO: 830 - DNA, 23 bp, Homo sapiens
  source 1..23: mol_type = genomic DNA
tgacctacctgagaaagaagtgg

SEQ ID NO: 831 - DNA, 23 bp, Homo sapiens
  source 1..23: mol_type = genomic DNA
gtcatatagtgagatgaggatgg

SEQ ID NO: 832 - DNA, 23 bp, Homo sapiens
  source 1..23: mol_type = genomic DNA
cagctactctacacgcagcatgg

SEQ ID NO: 833 - DNA, 23 bp, Homo sapiens
  source 1..23: mol_type = genomic DNA
gtagcactgtgtacactgaaagg

SEQ ID NO: 834 - DNA, 23 bp, Homo sapiens
  source 1..23: mol_type = genomic DNA
agtcgggtcacaggaagagtggg

SEQ ID NO: 835 - DNA, 23 bp, Homo sapiens
  source 1..23: mol_type = genomic DNA
ttattgtccatataaatagacgg

SEQ ID NO: 836 - DNA, 23 bp, Homo sapiens
  source 1..23: mol_type = genomic DNA
tttaatcaaaaatttcaaccagg

SEQ ID NO: 837 - DNA, 23 bp, Homo sapiens
  source 1..23: mol_type = genomic DNA
taagtcccttctttaaactgtgg

SEQ ID NO: 838 - DNA, 23 bp, Homo sapiens
  source 1..23: mol_type = genomic DNA
aagtctaagaacaaatcagaagg

SEQ ID NO: 839 - DNA, 23 bp, Homo sapiens
  source 1..23: mol_type = genomic DNA
accatgccctctactgatgtggg

SEQ ID NO: 840 - DNA, 23 bp, Homo sapiens
  source 1..23: mol_type = genomic DNA
tttgcataaaatctaccagtagg

SEQ ID NO: 841 - DNA, 23 bp, Homo sapiens
  source 1..23: mol_type = genomic DNA
tttaaagtggcacaaacagaggg

SEQ ID NO: 842 - DNA, 23 bp, Homo sapiens
  source 1..23: mol_type = genomic DNA
acgatggagtgcagaatatgggg

SEQ ID NO: 843 - DNA, 23 bp, Homo sapiens
  source 1..23: mol_type = genomic DNA
tcatttatacagaagacccacgg

SEQ ID NO: 844 - DNA, 23 bp, Homo sapiens
  source 1..23: mol_type = genomic DNA
atttatcagtagtttaggcgtgg

SEQ ID NO: 845 - DNA, 23 bp, Homo sapiens
  source 1..23: mol_type = genomic DNA
agttccatgtcctagctcgaggg

SEQ ID NO: 846 - DNA, 23 bp, Homo sapiens
  source 1..23: mol_type = genomic DNA
aattctgcctgaataccagaagg

SEQ ID NO: 847 - DNA, 23 bp, Homo sapiens
  source 1..23: mol_type = genomic DNA
taaatatgcaactcatggagtgg

SEQ ID NO: 848 - DNA, 23 bp, Homo sapiens
  source 1..23: mol_type = genomic DNA
tggagggcgacgcgcagaggcgg

SEQ ID NO: 849 - DNA, 23 bp, Homo sapiens
  source 1..23: mol_type = genomic DNA
gacaccagctggacatcagaggg

SEQ ID NO: 850 - DNA, 23 bp, Homo sapiens
  source 1..23: mol_type = genomic DNA
aagcaattatgtcgataactggg

SEQ ID NO: 851 - DNA, 23 bp, Homo sapiens
  source 1..23: mol_type = genomic DNA
agcccaccaactgaaatgaaagg

SEQ ID NO: 852 - DNA, 23 bp, Homo sapiens
  source 1..23: mol_type = genomic DNA
tcttttgtagtggcagccagagg

SEQ ID NO: 853 - DNA, 23 bp, Homo sapiens
  source 1..23: mol_type = genomic DNA
ggaggcaccagtgtttaaagtgg

SEQ ID NO: 854 - DNA, 23 bp, Homo sapiens
  source 1..23: mol_type = genomic DNA
atgccaacctgaagaacgtgagg

SEQ ID NO: 855 - DNA, 23 bp, Homo sapiens
  source 1..23: mol_type = genomic DNA
catctaccattatttccacaggg

SEQ ID NO: 856 - DNA, 23 bp, Homo sapiens
  source 1..23: mol_type = genomic DNA
cttaggaatatggagcaatgagg

SEQ ID NO: 857 - DNA, 23 bp, Homo sapiens
  source 1..23: mol_type = genomic DNA
agttatttctagaggaactgagg

SEQ ID NO: 858 - DNA, 23 bp, Homo sapiens
  source 1..23: mol_type = genomic DNA
acacatccttgaagaatgagagg

SEQ ID NO: 859 - DNA, 23 bp, Homo sapiens
  source 1..23: mol_type = genomic DNA
taaactttcactcaaacccatgg

SEQ ID NO: 860 - DNA, 23 bp, Homo sapiens
  source 1..23: mol_type = genomic DNA
atatggcaaactaaagaaagggg

SEQ ID NO: 861 - DNA, 23 bp, Homo sapiens
  source 1..23: mol_type = genomic DNA
gtttaaagtggcacaaacagagg

SEQ ID NO: 862 - DNA, 23 bp, Homo sapiens
  source 1..23: mol_type = genomic DNA
acaggagctctaagtccagtggg

SEQ ID NO: 863 - DNA, 23 bp, Homo sapiens
  source 1..23: mol_type = genomic DNA
tcccccagttcccattagtgagg

SEQ ID NO: 864 - DNA, 23 bp, Homo sapiens
  source 1..23: mol_type = genomic DNA
attgtccatttactggacaatgg

SEQ ID NO: 865 - DNA, 23 bp, Homo sapiens
  source 1..23: mol_type = genomic DNA
ttgttgaatgctgatccagaagg

SEQ ID NO: 866 - DNA, 23 bp, Homo sapiens
  source 1..23: mol_type = genomic DNA
caaagagcgtaggaattcagtgg

SEQ ID NO: 867 - DNA, 23 bp, Homo sapiens
  source 1..23: mol_type = genomic DNA
ggtggctttaggttaactaaggg

SEQ ID NO: 868 - DNA, 23 bp, Homo sapiens
  source 1..23: mol_type = genomic DNA
aatgttacatgaaaaatgaacgg

SEQ ID NO: 869 - DNA, 23 bp, Homo sapiens
  source 1..23: mol_type = genomic DNA
ggattaaatcatgaacaggaagg

SEQ ID NO: 870 - DNA, 23 bp, Homo sapiens
  source 1..23: mol_type = genomic DNA
tggtctctatatcagtcgatggg

SEQ ID NO: 871 - DNA, 23 bp, Homo sapiens
  source 1..23: mol_type = genomic DNA
cataaattaatgcaaacgtgtgg

SEQ ID NO: 872 - DNA, 23 bp, Homo sapiens
  source 1..23: mol_type = genomic DNA
gactggactattcttacaagggg

SEQ ID NO: 873 - DNA, 23 bp, Homo sapiens
  source 1..23: mol_type = genomic DNA
gttggaaaataagagggcagagg

SEQ ID NO: 874 - DNA, 23 bp, Homo sapiens
  source 1..23: mol_type = genomic DNA
atcaaccagtaatttctgaaggg

SEQ ID NO: 875 - DNA, 23 bp, Homo sapiens
  source 1..23: mol_type = genomic DNA
agaaaatgtatctttaaaagggg

SEQ ID NO: 876 - DNA, 23 bp, Homo sapiens
  source 1..23: mol_type = genomic DNA
ttaggaagattctatgcacaggg

SEQ ID NO: 877 - DNA, 23 bp, Homo sapiens
  source 1..23: mol_type = genomic DNA
acaatagtttacatttactgagg

SEQ ID NO: 878 - DNA, 23 bp, Homo sapiens
  source 1..23: mol_type = genomic DNA
ggcacagctaccaggaaaagggg

SEQ ID NO: 879 - DNA, 23 bp, Homo sapiens
  source 1..23: mol_type = genomic DNA
ggtagccaattatggcccacagg

SEQ ID NO: 880 - DNA, 23 bp, Homo sapiens
  source 1..23: mol_type = genomic DNA
attgatttgaatatacacttcgg

SEQ ID NO: 881 - DNA, 23 bp, Homo sapiens
  source 1..23: mol_type = genomic DNA
agatgagaagatagtctttgggg

SEQ ID NO: 882 - DNA, 23 bp, Homo sapiens
  source 1..23: mol_type = genomic DNA
cgagaaatcatagaccagctggg

SEQ ID NO: 883 - DNA, 23 bp, Homo sapiens
  source 1..23: mol_type = genomic DNA
tctctctcaaaagtactgcaagg

SEQ ID NO: 884 - DNA, 23 bp, Homo sapiens
  source 1..23: mol_type = genomic DNA
actactgtataggaactacatgg

SEQ ID NO: 885 - DNA, 23 bp, Homo sapiens
  source 1..23: mol_type = genomic DNA
atatttaaaataaaaaggggagg

SEQ ID NO: 886 - DNA, 23 bp, Homo sapiens
  source 1..23: mol_type = genomic DNA
aatttagatccctttccaagtgg

SEQ ID NO: 887 - DNA, 23 bp, Homo sapiens
  source 1..23: mol_type = genomic DNA
atattttccacagtaatcagtgg

SEQ ID NO: 888 - DNA, 23 bp, Homo sapiens
  source 1..23: mol_type = genomic DNA
ttgggaatttcagtaggcaacgg

SEQ ID NO: 889 - DNA, 23 bp, Homo sapiens
  source 1..23: mol_type = genomic DNA
ttttaaatgatatttccttgggg

SEQ ID NO: 890 - DNA, 23 bp, Homo sapiens
  source 1..23: mol_type = genomic DNA
tgtatctacttggaactcgtggg

SEQ ID NO: 891 - DNA, 23 bp, Homo sapiens
  source 1..23: mol_type = genomic DNA
agacaaatgagaatgaggaaggg

SEQ ID NO: 892 - DNA, 23 bp, Homo sapiens
  source 1..23: mol_type = genomic DNA
gaattcacaaacacagatagggg

SEQ ID NO: 893 - DNA, 23 bp, Homo sapiens
  source 1..23: mol_type = genomic DNA
cacacctctggaaggaacacagg

SEQ ID NO: 894 - DNA, 23 bp, Homo sapiens
  source 1..23: mol_type = genomic DNA
gtgactgatatgaattcaagggg

SEQ ID NO: 895 - DNA, 23 bp, Homo sapiens
  source 1..23: mol_type = genomic DNA
gtgttattccaatcctagagtgg

SEQ ID NO: 896 - DNA, 23 bp, Homo sapiens
  source 1..23: mol_type = genomic DNA
atatatcaatatctcctgcaggg

SEQ ID NO: 897 - DNA, 23 bp, Homo sapiens
  source 1..23: mol_type = genomic DNA
ttattttctggttggcactgagg

SEQ ID NO: 898 - DNA, 23 bp, Homo sapiens
  source 1..23: mol_type = genomic DNA
tattttacaacaggtataagcgg

SEQ ID NO: 899 - DNA, 23 bp, Homo sapiens
  source 1..23: mol_type = genomic DNA
acagtcctagacacccatagagg

SEQ ID NO: 900 - DNA, 23 bp, Homo sapiens
  source 1..23: mol_type = genomic DNA
atgctaatagattatccaagtgg

SEQ ID NO: 901 - DNA, 23 bp, Homo sapiens
  source 1..23: mol_type = genomic DNA
tagactatatttgtagctgtggg

SEQ ID NO: 902 - DNA, 23 bp, Homo sapiens
  source 1..23: mol_type = genomic DNA
cattctcaaaaattatatcgagg

SEQ ID NO: 903 - DNA, 23 bp, Homo sapiens
  source 1..23: mol_type = genomic DNA
gacaatgcctgagactacctggg

SEQ ID NO: 904 - DNA, 23 bp, Homo sapiens
  source 1..23: mol_type = genomic DNA
ggtcatctagtctctaatgaggg

SEQ ID NO: 905 - DNA, 23 bp, Homo sapiens
  source 1..23: mol_type = genomic DNA
gtctaagctagtactaggtgagg

SEQ ID NO: 906 - DNA, 23 bp, Homo sapiens
  source 1..23: mol_type = genomic DNA
ttgttagacccatctatgagtgg

SEQ ID NO: 907 - DNA, 23 bp, Homo sapiens
  source 1..23: mol_type = genomic DNA
atatatgcttcaattttgtgagg

SEQ ID NO: 908 - DNA, 23 bp, Homo sapiens
  source 1..23: mol_type = genomic DNA
gcttattaggaaaatcacattgg

SEQ ID NO: 909 - DNA, 23 bp, Homo sapiens
  source 1..23: mol_type = genomic DNA
gttaaacatcaatagagggaggg

SEQ ID NO: 910 - DNA, 23 bp, Homo sapiens
  source 1..23: mol_type = genomic DNA
acgaattattcatctacccgtgg

SEQ ID NO: 911 - DNA, 23 bp, Homo sapiens
  source 1..23: mol_type = genomic DNA
gagcagtatgatgaagtgcaggg

SEQ ID NO: 912 - DNA, 23 bp, Homo sapiens
  source 1..23: mol_type = genomic DNA
tgatttaagtgagtgtatcaggg

SEQ ID NO: 913 - DNA, 23 bp, Homo sapiens
  source 1..23: mol_type = genomic DNA
cagcatggttcagttgatggtgg

SEQ ID NO: 914 - DNA, 23 bp, Homo sapiens
  source 1..23: mol_type = genomic DNA
ctactagtaacacaatactcagg

SEQ ID NO: 915 - DNA, 23 bp, Homo sapiens
  source 1..23: mol_type = genomic DNA
aagcattgtaaggtactacatgg

SEQ ID NO: 916 - DNA, 23 bp, Homo sapiens
  source 1..23: mol_type = genomic DNA
tttctaagaactaggccttgggg

SEQ ID NO: 917 - DNA, 23 bp, Homo sapiens
  source 1..23: mol_type = genomic DNA
gaaaggagagaagctttgagagg

SEQ ID NO: 918 - DNA, 23 bp, Homo sapiens
  source 1..23: mol_type = genomic DNA
attttacaccaggtcgaaggagg

SEQ ID NO: 919 - DNA, 23 bp, Homo sapiens
  source 1..23: mol_type = genomic DNA
atgcccagagccataaggagtgg

SEQ ID NO: 920 - DNA, 23 bp, Homo sapiens
  source 1..23: mol_type = genomic DNA
aaccttatatgtagtgaccatgg

SEQ ID NO: 921 - DNA, 23 bp, Homo sapiens
  source 1..23: mol_type = genomic DNA
taacaaaaactagaacaaagtgg

SEQ ID NO: 922 - DNA, 23 bp, Homo sapiens
  source 1..23: mol_type = genomic DNA
acagggaccatcctatccatagg

SEQ ID NO: 923 - DNA, 23 bp, Homo sapiens
  source 1..23: mol_type = genomic DNA
ggaagaagctgggagtccaaagg

SEQ ID NO: 924 - DNA, 23 bp, Homo sapiens
  source 1..23: mol_type = genomic DNA
tttctgctaccagtagaagtggg

SEQ ID NO: 925 - DNA, 23 bp, Homo sapiens
  source 1..23: mol_type = genomic DNA
tgattttaaagaaatagtagtgg

SEQ ID NO: 926 - DNA, 23 bp, Homo sapiens
  source 1..23: mol_type = genomic DNA
tccgtgagcctaaagaacaatgg

SEQ ID NO: 927 - DNA, 23 bp, Homo sapiens
  source 1..23: mol_type = genomic DNA
tatacaaaacaaaacatgagagg

SEQ ID NO: 928 - DNA, 23 bp, Homo sapiens
  source 1..23: mol_type = genomic DNA
actaaaatagctaacttcagagg

SEQ ID NO: 929 - DNA, 23 bp, Homo sapiens
  source 1..23: mol_type = genomic DNA
cctacactatgcaagtgggttgg

SEQ ID NO: 930 - DNA, 23 bp, Homo sapiens
  source 1..23: mol_type = genomic DNA
agtaacacaaagcaaaaatgtgg

SEQ ID NO: 931 - DNA, 23 bp, Homo sapiens
  source 1..23: mol_type = genomic DNA
tgtcactttcatttattcggggg

SEQ ID NO: 932 - DNA, 23 bp, Homo sapiens
  source 1..23: mol_type = genomic DNA
atgacaggtttatattctggagg

SEQ ID NO: 933 - DNA, 23 bp, Homo sapiens
  source 1..23: mol_type = genomic DNA
attggcttagaaaacatgagtgg

SEQ ID NO: 934 - DNA, 23 bp, Homo sapiens
  source 1..23: mol_type = genomic DNA
tatacttatattcaagcacaggg

SEQ ID NO: 935 - DNA, 23 bp, Homo sapiens
  source 1..23: mol_type = genomic DNA
agagttcccaggacgcaggaagg

SEQ ID NO: 936 - DNA, 23 bp, Homo sapiens
  source 1..23: mol_type = genomic DNA
aaaaggctgccagagtaacacgg

SEQ ID NO: 937 - DNA, 23 bp, Homo sapiens
  source 1..23: mol_type = genomic DNA
aaagtaagcaaaattgaggaggg

SEQ ID NO: 938 - DNA, 23 bp, Homo sapiens
  source 1..23: mol_type = genomic DNA
actcttgatttcactgacagagg

SEQ ID NO: 939 - DNA, 23 bp, Homo sapiens
  source 1..23: mol_type = genomic DNA
catgaataaatacattcaagagg

SEQ ID NO: 940 - DNA, 23 bp, Homo sapiens
  source 1..23: mol_type = genomic DNA
gtagaccgacagctattcacagg

SEQ ID NO: 941 - DNA, 23 bp, Homo sapiens
  source 1..23: mol_type = genomic DNA
taactcatagttatataatgggg

SEQ ID NO: 942 - DNA, 23 bp, Homo sapiens
  source 1..23: mol_type = genomic DNA
ctaataacgataggaaacaatgg

SEQ ID NO: 943 - DNA, 23 bp, Homo sapiens
  source 1..23: mol_type = genomic DNA
attgccttcttacctgacgatgg

SEQ ID NO: 944 - DNA, 23 bp, Homo sapiens
  source 1..23: mol_type = genomic DNA
tttcatacacactcatcatgggg

SEQ ID NO: 945 - DNA, 23 bp, Homo sapiens
  source 1..23: mol_type = genomic DNA
tcattcagagattataaccaggg

SEQ ID NO: 946 - DNA, 23 bp, Homo sapiens
  source 1..23: mol_type = genomic DNA
atttactgtggcaacaggagagg

SEQ ID NO: 947 - DNA, 23 bp, Homo sapiens
  source 1..23: mol_type = genomic DNA
tgtctgtgagacaaaatgaaagg

SEQ ID NO: 948 - DNA, 23 bp, Homo sapiens
  source 1..23: mol_type = genomic DNA
tgttgaccctgatgatgctgagg

SEQ ID NO: 949 - DNA, 23 bp, Homo sapiens
  source 1..23: mol_type = genomic DNA
tagtgagaccactctaaggatgg

SEQ ID NO: 950 - DNA, 23 bp, Homo sapiens
  source 1..23: mol_type = genomic DNA
ctacataaactctattcatgggg

SEQ ID NO: 951 - DNA, 23 bp, Homo sapiens
  source 1..23: mol_type = genomic DNA
gctttggtgggaagaagtagagg

SEQ ID NO: 952 - DNA, 23 bp, Homo sapiens
  source 1..23: mol_type = genomic DNA
tcccttaagacttactctgacgg

SEQ ID NO: 953 - DNA, 23 bp, Homo sapiens
  source 1..23: mol_type = genomic DNA
cacagggcctggattataagggg

SEQ ID NO: 954 - DNA, 23 bp, Homo sapiens
  source 1..23: mol_type = genomic DNA
acgcagattgtaattagaggtgg

SEQ ID NO: 955 - DNA, 23 bp, Homo sapiens
  source 1..23: mol_type = genomic DNA
gtaagccacaagtgtaatggggg

SEQ ID NO: 956 - DNA, 23 bp, Homo sapiens
  source 1..23: mol_type = genomic DNA
aatagcaaggagtagatacaggg

SEQ ID NO: 957 - DNA, 23 bp, Homo sapiens
  source 1..23: mol_type = genomic DNA
cctttaagtaagacagccagggg

SEQ ID NO: 958 - DNA, 23 bp, Homo sapiens
  source 1..23: mol_type = genomic DNA
ttatacaaataaatttacaaggg

SEQ ID NO: 959 - DNA, 23 bp, Homo sapiens
  source 1..23: mol_type = genomic DNA
tcgaatgtggatatcccaagagg

SEQ ID NO: 960 - DNA, 23 bp, Homo sapiens
  source 1..23: mol_type = genomic DNA
tggggacaacagcaaagtggtgg

SEQ ID NO: 961 - DNA, 23 bp, Homo sapiens
  source 1..23: mol_type = genomic DNA
attcaggtttgggatcaggaagg

SEQ ID NO: 962 - DNA, 23 bp, Homo sapiens
  source 1..23: mol_type = genomic DNA
gctcttcagaaagatgagcaggg

SEQ ID NO: 963 - DNA, 23 bp, Homo sapiens
  source 1..23: mol_type = genomic DNA
gcgaaaaccagagccacactagg

SEQ ID NO: 964 - DNA, 23 bp, Homo sapiens
  source 1..23: mol_type = genomic DNA
acttcacatatgcctcactaagg

SEQ ID NO: 965 - DNA, 23 bp, Homo sapiens
  source 1..23: mol_type = genomic DNA
cataaactattagtgcctgaggg

SEQ ID NO: 966 - DNA, 23 bp, Homo sapiens
  source 1..23: mol_type = genomic DNA
atacatagcccatatgtcaaagg

SEQ ID NO: 967 - DNA, 23 bp, Homo sapiens
  source 1..23: mol_type = genomic DNA
ggagagctgcagcctacatgagg

SEQ ID NO: 968 - DNA, 23 bp, Homo sapiens
  source 1..23: mol_type = genomic DNA
ccctacataatagtatgcaaggg

SEQ ID NO: 969 - DNA, 23 bp, Homo sapiens
  source 1..23: mol_type = genomic DNA
atagtgtgggtcaactgaagggg

SEQ ID NO: 970 - DNA, 23 bp, Homo sapiens
  source 1..23: mol_type = genomic DNA
gaatggattggacagacgctagg

SEQ ID NO: 971 - DNA, 23 bp, Homo sapiens
  source 1..23: mol_type = genomic DNA
tctgtgacgacgatcattggtgg

SEQ ID NO: 972 - DNA, 23 bp, Homo sapiens
  source 1..23: mol_type = genomic DNA
ttcttgtattaaagacgtagagg

SEQ ID NO: 973 - DNA, 23 bp, Homo sapiens
  source 1..23: mol_type = genomic DNA
gatcggcaaaggaagaagctggg

SEQ ID NO: 974 - DNA, 23 bp, Homo sapiens
  source 1..23: mol_type = genomic DNA
aatacctacataaaaataagggg

SEQ ID NO: 975 - DNA, 23 bp, Homo sapiens
  source 1..23: mol_type = genomic DNA
ataaaatatcatgatgatggagg

SEQ ID NO: 976 - DNA, 23 bp, Homo sapiens
  source 1..23: mol_type = genomic DNA
ttaatactgcaatataagcaagg

SEQ ID NO: 977 - DNA, 23 bp, Homo sapiens
  source 1..23: mol_type = genomic DNA
acttatagctacgatccacttgg

SEQ ID NO: 978 - DNA, 23 bp, Homo sapiens
  source 1..23: mol_type = genomic DNA
tcagggtaatgcttagaggtggg

SEQ ID NO: 979 - DNA, 23 bp, Homo sapiens
  source 1..23: mol_type = genomic DNA
tttagcatagttgcaatgtgtgg

SEQ ID NO: 980 - DNA, 23 bp, Homo sapiens
  source 1..23: mol_type = genomic DNA
attttggattctggagacagtgg

SEQ ID NO: 981 - DNA, 23 bp, Homo sapiens
  source 1..23: mol_type = genomic DNA
ccagtttccaaaaaagtctgagg

SEQ ID NO: 982 - DNA, 23 bp, Homo sapiens
  source 1..23: mol_type = genomic DNA
ataattagacaattcagagaagg

SEQ ID NO: 983 - DNA, 23 bp, Homo sapiens
  source 1..23: mol_type = genomic DNA
aaaagaacctaaagtacacaggg

SEQ ID NO: 984 - DNA, 23 bp, Homo sapiens
  source 1..23: mol_type = genomic DNA
aatggacatattttcccaagtgg

SEQ ID NO: 985 - DNA, 23 bp, Homo sapiens
  source 1..23: mol_type = genomic DNA
ataaattcatagtcaatatgggg

SEQ ID NO: 986 - DNA, 23 bp, Homo sapiens
  source 1..23: mol_type = genomic DNA
tggtggcttgaggaaatgtgggg

SEQ ID NO: 987 - DNA, 23 bp, Homo sapiens
  source 1..23: mol_type = genomic DNA
gtgctaacatgcagtagaggagg

SEQ ID NO: 988 - DNA, 23 bp, Homo sapiens
  source 1..23: mol_type = genomic DNA
ttttttttcagtcaatctagagg

SEQ ID NO: 989 - DNA, 23 bp, Homo sapiens
  source 1..23: mol_type = genomic DNA
agatgtcattggaaaaatggggg

SEQ ID NO: 990 - DNA, 23 bp, Homo sapiens
  source 1..23: mol_type = genomic DNA
tgttagacccatctatgagtggg

SEQ ID NO: 991 - DNA, 23 bp, Homo sapiens
  source 1..23: mol_type = genomic DNA
acaggattgttgattgcctgtgg

SEQ ID NO: 992 - DNA, 23 bp, Homo sapiens
  source 1..23: mol_type = genomic DNA
agactattgccttcatagcgagg

SEQ ID NO: 993 - DNA, 23 bp, Homo sapiens
  source 1..23: mol_type = genomic DNA
gatgaatgatcacattaggaagg

SEQ ID NO: 994 - DNA, 23 bp, Homo sapiens
  source 1..23: mol_type = genomic DNA
acaagtgctagtgcgtgaagtgg

SEQ ID NO: 995 - DNA, 23 bp, Homo sapiens
  source 1..23: mol_type = genomic DNA
tcagtaaattaattagcaagtgg

SEQ ID NO: 996 - DNA, 23 bp, Homo sapiens
  source 1..23: mol_type = genomic DNA
tgcctttgatgaaaatacgtggg

SEQ ID NO: 997 - DNA, 23 bp, Homo sapiens
  source 1..23: mol_type = genomic DNA
cctccaccttgagggctcagagg

SEQ ID NO: 998 - DNA, 23 bp, Homo sapiens
  source 1..23: mol_type = genomic DNA
aaaaaaagaaacttccaaagagg

SEQ ID NO: 999 - DNA, 23 bp, Homo sapiens
  source 1..23: mol_type = genomic DNA
tccatagacaatgaagcccatgg

SEQ ID NO: 1000 - DNA, 23 bp, Homo sapiens
  source 1..23: mol_type = genomic DNA
tggcaattaaatgtatctcaggg

SEQ ID NO: 1001 - DNA, 23 bp, Homo sapiens
  source 1..23: mol_type = genomic DNA
acactcccctctcacagcaatgg

SEQ ID NO: 1002 - DNA, 23 bp, Homo sapiens
  source 1..23: mol_type = genomic DNA
gtgtataatacatgccaagaggg

SEQ ID NO: 1003 - DNA, 23 bp, Homo sapiens
  source 1..23: mol_type = genomic DNA
ccaacccacttgcatagtgtagg

SEQ ID NO: 1004 - DNA, 23 bp, Homo sapiens
  source 1..23: mol_type = genomic DNA
gcaagtccaaaggcatgtgatgg

SEQ ID NO: 1005 - DNA, 23 bp, Homo sapiens
  source 1..23: mol_type = genomic DNA
aattgtttatgactgtgggatgg

SEQ ID NO: 1006 - DNA, 23 bp, Homo sapiens
  source 1..23: mol_type = genomic DNA
atacctcaaaggaaaatggccgg

SEQ ID NO: 1007 - DNA, 23 bp, Homo sapiens
  source 1..23: mol_type = genomic DNA
gtagaagtactatatataggagg

SEQ ID NO: 1008 - DNA, 23 bp, Homo sapiens
  source 1..23: mol_type = genomic DNA
actttgcctacacaaaaagctgg

SEQ ID NO: 1009 - DNA, 23 bp, Homo sapiens
  source 1..23: mol_type = genomic DNA
aaccaacttgagagagaaggcgg

SEQ ID NO: 1010 - DNA, 23 bp, Homo sapiens
  source 1..23: mol_type = genomic DNA
tcaagggcttgtgaagatgaggg

SEQ ID NO: 1011 - DNA, 23 bp, Homo sapiens
  source 1..23: mol_type = genomic DNA
cagaggagaaaaatgagaagagg

SEQ ID NO: 1012 - DNA, 23 bp, Homo sapiens
  source 1..23: mol_type = genomic DNA
gcagacatattatctgatcaggg

SEQ ID NO: 1013 - DNA, 23 bp, Homo sapiens
  source 1..23: mol_type = genomic DNA
gactggctagactagggctaggg

SEQ ID NO: 1014 - DNA, 23 bp, Homo sapiens
  source 1..23: mol_type = genomic DNA
acatacggatgaattcagtaagg

SEQ ID NO: 1015 - DNA, 23 bp, Homo sapiens
  source 1..23: mol_type = genomic DNA
aaacaacatctacctgtaagggg

SEQ ID NO: 1016 - DNA, 23 bp, Homo sapiens
  source 1..23: mol_type = genomic DNA
atgagagctttatactaagacgg

SEQ ID NO: 1017 - DNA, 23 bp, Homo sapiens
  source 1..23: mol_type = genomic DNA
ttttgcatccaaatgctacaggg

SEQ ID NO: 1018 - DNA, 23 bp, Homo sapiens
  source 1..23: mol_type = genomic DNA
catttgaataaaagaatctgagg

SEQ ID NO: 1019 - DNA, 23 bp, Homo sapiens
  source 1..23: mol_type = genomic DNA
tcaaatccagatgctaccacagg

SEQ ID NO: 1020 - DNA, 23 bp, Homo sapiens
  source 1..23: mol_type = genomic DNA
atgaataaatacattcaagaggg

SEQ ID NO: 1021 - DNA, 23 bp, Homo sapiens
  source 1..23: mol_type = genomic DNA
agcaatgtcagcgagcttggtgg

SEQ ID NO: 1022 - DNA, 23 bp, Homo sapiens
  source 1..23: mol_type = genomic DNA
tacattttttatgagccccgtgg

SEQ ID NO: 1023 - DNA, 23 bp, Homo sapiens
  source 1..23: mol_type = genomic DNA
aaaggcattatggtagggggagg

SEQ ID NO: 1024 - DNA, 23 bp, Homo sapiens
  source 1..23: mol_type = genomic DNA
tagttttaatggcccaaaagggg

SEQ ID NO: 1025 - DNA, 23 bp, Homo sapiens
  source 1..23: mol_type = genomic DNA
gccaagtgccaaatggtgcaggg

SEQ ID NO: 1026 - DNA, 23 bp, Homo sapiens
  source 1..23: mol_type = genomic DNA
ttagtgaggcatatgtgaagtgg

SEQ ID NO: 1027 - DNA, 23 bp, Homo sapiens
  source 1..23: mol_type = genomic DNA
tcactgagttgaacttgtagagg

SEQ ID NO: 1028 - DNA, 23 bp, Homo sapiens
  source 1..23: mol_type = genomic DNA
tctactgcatataacactgatgg

SEQ ID NO: 1029 - DNA, 23 bp, Homo sapiens
  source 1..23: mol_type = genomic DNA
agggcaaaagaactgtagacggg

SEQ ID NO: 1030 - DNA, 23 bp, Homo sapiens
  source 1..23: mol_type = genomic DNA
tagtacttggcataaacagtagg

SEQ ID NO: 1031 - DNA, 23 bp, Homo sapiens
  source 1..23: mol_type = genomic DNA
aagttaaaatggcaacaccatgg

SEQ ID NO: 1032 - DNA, 23 bp, Homo sapiens
  source 1..23: mol_type = genomic DNA
ctatcttttcaagatccctgtgg

SEQ ID NO: 1033 - DNA, 23 bp, Homo sapiens
  source 1..23: mol_type = genomic DNA
accacagatatattcctaggagg

SEQ ID NO: 1034 - DNA, 23 bp, Homo sapiens
  source 1..23: mol_type = genomic DNA
atttgcagccttttgtagagggg

SEQ ID NO: 1035 - DNA, 23 bp, Homo sapiens
  source 1..23: mol_type = genomic DNA
atttacgtatattatgcccaagg

SEQ ID NO: 1036 - DNA, 23 bp, Homo sapiens
  source 1..23: mol_type = genomic DNA
atggcagaagaactaaaggcagg

SEQ ID NO: 1037 - DNA, 23 bp, Homo sapiens
  source 1..23: mol_type = genomic DNA
ataatgatttctgcattgtgtgg

SEQ ID NO: 1038 - DNA, 23 bp, Homo sapiens
  source 1..23: mol_type = genomic DNA
ctgtttgtatggctagggtgagg

SEQ ID NO: 1039 - DNA, 23 bp, Homo sapiens
  source 1..23: mol_type = genomic DNA
ttttggcttctctcctagggagg

SEQ ID NO: 1040 - DNA, 23 bp, Homo sapiens
  source 1..23: mol_type = genomic DNA
acattttttatgagccccgtggg

SEQ ID NO: 1041 - DNA, 23 bp, Homo sapiens
  source 1..23: mol_type = genomic DNA
aagactataaaactgaggaaagg

SEQ ID NO: 1042 - DNA, 23 bp, Homo sapiens
  source 1..23: mol_type = genomic DNA
aatgcaattacaattatgcaagg

SEQ ID NO: 1043 - DNA, 23 bp, Homo sapiens
  source 1..23: mol_type = genomic DNA
tctctgttggaagtgaatagggg

SEQ ID NO: 1044 - DNA, 23 bp, Homo sapiens
  source 1..23: mol_type = genomic DNA
caaaggaaataaaagtatggcgg

SEQ ID NO: 1045 - DNA, 23 bp, Homo sapiens
  source 1..23: mol_type = genomic DNA
tctgaggtgagaagctagtgagg

SEQ ID NO: 1046 - DNA, 23 bp, Homo sapiens
  source 1..23: mol_type = genomic DNA
ctgccctctgtaaatatgagagg

SEQ ID NO: 1047 - DNA, 23 bp, Homo sapiens
  source 1..23: mol_type = genomic DNA
tattccaagggcctaccgcaagg

SEQ ID NO: 1048 - DNA, 23 bp, Homo sapiens
  source 1..23: mol_type = genomic DNA
agaacccagctaagagagggagg

SEQ ID NO: 1049 - DNA, 23 bp, Homo sapiens
  source 1..23: mol_type = genomic DNA
tctatatttaaaataaaaagggg

SEQ ID NO: 1050 - DNA, 23 bp, Homo sapiens
  source 1..23: mol_type = genomic DNA
cttgaggctgcaaagagcgtagg

SEQ ID NO: 1051 - DNA, 23 bp, Homo sapiens
  source 1..23: mol_type = genomic DNA
tcaataaattcgtagccctaggg

SEQ ID NO: 1052 - DNA, 23 bp, Homo sapiens
  source 1..23: mol_type = genomic DNA
aagggagtaggtgacgaagatgg

SEQ ID NO: 1053 - DNA, 23 bp, Homo sapiens
  source 1..23: mol_type = genomic DNA
aggtgtgtctcagggtagagagg

SEQ ID NO: 1054 - DNA, 23 bp, Homo sapiens
  source 1..23: mol_type = genomic DNA
ggccttccttagaatctgcacgg

SEQ ID NO: 1055 - DNA, 23 bp, Homo sapiens
  source 1..23: mol_type = genomic DNA
ttgagagtgattgttaccaaagg

SEQ ID NO: 1056 - DNA, 23 bp, Homo sapiens
  source 1..23: mol_type = genomic DNA
aaatatatattcaataccatagg

SEQ ID NO: 1057 - DNA, 23 bp, Homo sapiens
  source 1..23: mol_type = genomic DNA
ctcacagtcgcccctatgagggg

SEQ ID NO: 1058 - DNA, 23 bp, Homo sapiens
  source 1..23: mol_type = genomic DNA
ggactgctgagtttctgtagagg

SEQ ID NO: 1059 - DNA, 23 bp, Homo sapiens
  source 1..23: mol_type = genomic DNA
gagtggttccttcatgacatggg

SEQ ID NO: 1060 - DNA, 23 bp, Homo sapiens
  source 1..23: mol_type = genomic DNA
aatgaaagttgtaacaggagagg

SEQ ID NO: 1061 - DNA, 23 bp, Homo sapiens
  source 1..23: mol_type = genomic DNA
tgaccactaactaaatctgaagg

SEQ ID NO: 1062 - DNA, 23 bp, Homo sapiens
  source 1..23: mol_type = genomic DNA
gcctaatctaattcatagtgagg

SEQ ID NO: 1063 - DNA, 23 bp, Homo sapiens
  source 1..23: mol_type = genomic DNA
agtgctgacttaaagggcaaggg

SEQ ID NO: 1064 - DNA, 23 bp, Homo sapiens
  source 1..23: mol_type = genomic DNA
aggcagcgataaaaaaaacctgg

SEQ ID NO: 1065 - DNA, 23 bp, Homo sapiens
  source 1..23: mol_type = genomic DNA
ttgcagtttgtgtggttacgtgg

SEQ ID NO: 1066 - DNA, 23 bp, Homo sapiens
  source 1..23: mol_type = genomic DNA
gaaagtacgcatgcacatgtagg

SEQ ID NO: 1067 - DNA, 23 bp, Homo sapiens
  source 1..23: mol_type = genomic DNA
ctagcctgagccacacacaatgg

SEQ ID NO: 1068 - DNA, 23 bp, Homo sapiens
  source 1..23: mol_type = genomic DNA
tgggtccccattaattagcaagg

SEQ ID NO: 1069 - DNA, 23 bp, Homo sapiens
  source 1..23: mol_type = genomic DNA
agtaagcctttggatggggaagg

SEQ ID NO: 1070 - DNA, 23 bp, Homo sapiens
  source 1..23: mol_type = genomic DNA
actcccaaagatatataagtcgg

SEQ ID NO: 1071 - DNA, 23 bp, Homo sapiens
  source 1..23: mol_type = genomic DNA
catttactagataacaaacatgg

SEQ ID NO: 1072 - DNA, 23 bp, Homo sapiens
  source 1..23: mol_type = genomic DNA
ttttatagcatgaaaccccaagg

SEQ ID NO: 1073 - DNA, 23 bp, Homo sapiens
  source 1..23: mol_type = genomic DNA
tttgcaaaacaatttaagagggg

SEQ ID NO: 1074 - DNA, 23 bp, Homo sapiens
  source 1..23: mol_type = genomic DNA
acaacgtgctattagcaagtagg

SEQ ID NO: 1075 - DNA, 23 bp, Homo sapiens
  source 1..23: mol_type = genomic DNA
ggggggatctcctaaacgaaagg

SEQ ID NO: 1076 - DNA, 23 bp, Homo sapiens
  source 1..23: mol_type = genomic DNA
tccctgacaacacgaaagcatgg

SEQ ID NO: 1077 - DNA, 23 bp, Homo sapiens
  source 1..23: mol_type = genomic DNA
atcatctcaaagaactacatggg

SEQ ID NO: 1078 - DNA, 23 bp, Homo sapiens
  source 1..23: mol_type = genomic DNA
gtaggaaggaaggcaaactaggg

SEQ ID NO: 1079 - DNA, 23 bp, Homo sapiens
  source 1..23: mol_type = genomic DNA
ggaataaaataagaatgcgaagg

SEQ ID NO: 1080 - DNA, 23 bp, Homo sapiens
  source 1..23: mol_type = genomic DNA
ccttacatacatcacggagttgg

SEQ ID NO: 1081 - DNA, 23 bp, Homo sapiens
  source 1..23: mol_type = genomic DNA
gagcatcatgaccttacaagagg

SEQ ID NO: 1082 - DNA, 23 bp, Homo sapiens
  source 1..23: mol_type = genomic DNA
tttcaaagaaggctgaccacagg

SEQ ID NO: 1083 - DNA, 23 bp, Homo sapiens
  source 1..23: mol_type = genomic DNA
agctagtttttttttcagggggg

SEQ ID NO: 1084 - DNA, 23 bp, Homo sapiens
  source 1..23: mol_type = genomic DNA
tgtcttctagggtacactgtagg

SEQ ID NO: 1085 - DNA, 23 bp, Homo sapiens
  source 1..23: mol_type = genomic DNA
tcattcttttgagcatgaggagg

SEQ ID NO: 1086 - DNA, 23 bp, Homo sapiens
  source 1..23: mol_type = genomic DNA
actatcagcaattagtgagaggg

SEQ ID NO: 1087 - DNA, 23 bp, Homo sapiens
  source 1..23: mol_type = genomic DNA
agtaccttacagtgcaagcaggg

SEQ ID NO: 1088 - DNA, 23 bp, Homo sapiens
  source 1..23: mol_type = genomic DNA
cgatcagctttaagggacagtgg

SEQ ID NO: 1089 - DNA, 23 bp, Homo sapiens
  source 1..23: mol_type = genomic DNA
tatctttgattgagggaaggagg

SEQ ID NO: 1090 - DNA, 23 bp, Homo sapiens
  source 1..23: mol_type = genomic DNA
tgtaatccagaatggcccatagg

SEQ ID NO: 1091 - DNA, 23 bp, Homo sapiens
  source 1..23: mol_type = genomic DNA
aatcattattatcaacagaaggg

SEQ ID NO: 1092 - DNA, 23 bp, Homo sapiens
  source 1..23: mol_type = genomic DNA
tttttttacaagggaatgtgagg

SEQ ID NO: 1093 - DNA, 23 bp, Homo sapiens
  source 1..23: mol_type = genomic DNA
tagaattcaagcaatttggaggg

SEQ ID NO: 1094 - DNA, 23 bp, Homo sapiens
  source 1..23: mol_type = genomic DNA
ctattattcaaaagccagcaagg

SEQ ID NO: 1095 - DNA, 23 bp, Homo sapiens
  source 1..23: mol_type = genomic DNA
tcttataataggttattggaagg

SEQ ID NO: 1096 - DNA, 23 bp, Homo sapiens
  source 1..23: mol_type = genomic DNA
gggctgccaggtaaattggaagg

SEQ ID NO: 1097 - DNA, 23 bp, Homo sapiens
  source 1..23: mol_type = genomic DNA
agaataggcagttcaactaaggg

SEQ ID NO: 1098 - DNA, 23 bp, Homo sapiens
  source 1..23: mol_type = genomic DNA
tgatcgatctatgttttgggagg

SEQ ID NO: 1099 - DNA, 23 bp, Homo sapiens
  source 1..23: mol_type = genomic DNA
gtgtgtctatgaaaaggagtagg

SEQ ID NO: 1100 - DNA, 23 bp, Homo sapiens
  source 1..23: mol_type = genomic DNA
agaaccctacgcataagagcagg

SEQ ID NO: 1101 - DNA, 23 bp, Homo sapiens
  source 1..23: mol_type = genomic DNA
tgttcagttttggtgcaaggtgg

SEQ ID NO: 1102 - DNA, 23 bp, Homo sapiens
  source 1..23: mol_type = genomic DNA
tgtgctagcataatctcactagg

SEQ ID NO: 1103 - DNA, 23 bp, Homo sapiens
  source 1..23: mol_type = genomic DNA
aaaaagagccccaatttgtgggg

SEQ ID NO: 1104 - DNA, 23 bp, Homo sapiens
  source 1..23: mol_type = genomic DNA
gctattaggtctatgtgaggtgg

SEQ ID NO: 1105 - DNA, 23 bp, Homo sapiens
  source 1..23: mol_type = genomic DNA
aatcctactaattattaacatgg

SEQ ID NO: 1106 - DNA, 23 bp, Homo sapiens
  source 1..23: mol_type = genomic DNA
aatgtagtacatatccccattgg

SEQ ID NO: 1107 - DNA, 23 bp, Homo sapiens
  source 1..23: mol_type = genomic DNA
atttcttaaaatcctcacgaagg

SEQ ID NO: 1108 - DNA, 23 bp, Homo sapiens
  source 1..23: mol_type = genomic DNA
aggtgagagctggcaaacacagg

SEQ ID NO: 1109 - DNA, 23 bp, Homo sapiens
  source 1..23: mol_type = genomic DNA
ttattataaaagcaggtcagagg

SEQ ID NO: 1110 - DNA, 23 bp, Homo sapiens
  source 1..23: mol_type = genomic DNA
ggaaggatctgcgctaggtgtgg

SEQ ID NO: 1111 - DNA, 23 bp, Homo sapiens
  source 1..23: mol_type = genomic DNA
gcatgtagattagcctcacaggg

SEQ ID NO: 1112 - DNA, 23 bp, Homo sapiens
  source 1..23: mol_type = genomic DNA
agattagcgccatctcccatggg

SEQ ID NO: 1113 - DNA, 23 bp, Homo sapiens
  source 1..23: mol_type = genomic DNA
tgaacatagggatatgagaaggg

SEQ ID NO: 1114 - DNA, 23 bp, Homo sapiens
  source 1..23: mol_type = genomic DNA
ttcctgaaggagacttagaacgg

SEQ ID NO: 1115 - DNA, 23 bp, Homo sapiens
  source 1..23: mol_type = genomic DNA
tccaaactgataagtcctcaggg

SEQ ID NO: 1116 - DNA, 23 bp, Homo sapiens
  source 1..23: mol_type = genomic DNA
ttttaatcaagtatattcggtgg

SEQ ID NO: 1117 - DNA, 23 bp, Homo sapiens
  source 1..23: mol_type = genomic DNA
atacacctaattgctctctaggg

SEQ ID NO: 1118 - DNA, 23 bp, Homo sapiens
  source 1..23: mol_type = genomic DNA
tttcaacctctagccttcaaggg

SEQ ID NO: 1119 - DNA, 23 bp, Homo sapiens
  source 1..23: mol_type = genomic DNA
gcataagaggacactgcacatgg

SEQ ID NO: 1120 - DNA, 23 bp, Homo sapiens
  source 1..23: mol_type = genomic DNA
cacatgattgagtatcttagggg

SEQ ID NO: 1121 - DNA, 23 bp, Homo sapiens
  source 1..23: mol_type = genomic DNA
gctgtccttgctaattaatgggg

SEQ ID NO: 1122 - DNA, 23 bp, Homo sapiens
  source 1..23: mol_type = genomic DNA
cattgttgactcaaggacactgg

SEQ ID NO: 1123 - DNA, 23 bp, Homo sapiens
  source 1..23: mol_type = genomic DNA
gagttgttgaaaaaccctgcagg

SEQ ID NO: 1124 - DNA, 23 bp, Homo sapiens
  source 1..23: mol_type = genomic DNA
ctgtgcataaacactcaaccagg

SEQ ID NO: 1125 - DNA, 23 bp, Homo sapiens
  source 1..23: mol_type = genomic DNA
acgcaaattctagtttaaagcgg

SEQ ID NO: 1126 - DNA, 23 bp, Homo sapiens
  source 1..23: mol_type = genomic DNA
acactccacaagtcaaagatggg

SEQ ID NO: 1127 - DNA, 23 bp, Homo sapiens
  source 1..23: mol_type = genomic DNA
cctgtttgtttctttcactgtgg

SEQ ID NO: 1128 - DNA, 23 bp, Homo sapiens
  source 1..23: mol_type = genomic DNA
atccaagactgaaatggtagggg

SEQ ID NO: 1129 - DNA, 23 bp, Homo sapiens
  source 1..23: mol_type = genomic DNA
cttctcaagtgtctaagctgagg

SEQ ID NO: 1130 - DNA, 23 bp, Homo sapiens
  source 1..23: mol_type = genomic DNA
aacatgtcatctggtaaccatgg

SEQ ID NO: 1131 - DNA, 23 bp, Homo sapiens
  source 1..23: mol_type = genomic DNA
ttagaaataaactagccagaagg

SEQ ID NO: 1132 - DNA, 23 bp, Homo sapiens
  source 1..23: mol_type = genomic DNA
tatggttctgaattagcactcgg

SEQ ID NO: 1133 - DNA, 23 bp, Homo sapiens
  source 1..23: mol_type = genomic DNA
agggaggcattattgctcaatgg

SEQ ID NO: 1134 - DNA, 23 bp, Homo sapiens
  source 1..23: mol_type = genomic DNA
aattctgtgattaagtggcaggg

SEQ ID NO: 1135 - DNA, 23 bp, Homo sapiens
  source 1..23: mol_type = genomic DNA
tagaccctacactatgcaagtgg

SEQ ID NO: 1136 - DNA, 23 bp, Homo sapiens
  source 1..23: mol_type = genomic DNA
tcctcactaatgggaactggggg

SEQ ID NO: 1137 - DNA, 23 bp, Homo sapiens
  source 1..23: mol_type = genomic DNA
aactatcagcaattagtgagagg

SEQ ID NO: 1138 - DNA, 23 bp, Homo sapiens
  source 1..23: mol_type = genomic DNA
agttcacctacatctaaagaagg

SEQ ID NO: 1139 - DNA, 23 bp, Homo sapiens
  source 1..23: mol_type = genomic DNA
ctgagccacacacaatggatagg

SEQ ID NO: 1140 - DNA, 23 bp, Homo sapiens
  source 1..23: mol_type = genomic DNA
gggtaataggaatatgggatggg

SEQ ID NO: 1141 - DNA, 23 bp, Homo sapiens
  source 1..23: mol_type = genomic DNA
atccacacactattttgaagagg

SEQ ID NO: 1142 - DNA, 23 bp, Homo sapiens
  source 1..23: mol_type = genomic DNA
gggaaaaaacggattggagtggg

SEQ ID NO: 1143 - DNA, 23 bp, Homo sapiens
  source 1..23: mol_type = genomic DNA
acatattttagtcaaatcagagg

SEQ ID NO: 1144 - DNA, 23 bp, Homo sapiens
  source 1..23: mol_type = genomic DNA
gtgaaagcatttaaaaactgggg

SEQ ID NO: 1145 - DNA, 23 bp, Homo sapiens
  source 1..23: mol_type = genomic DNA
gatatgtttaatcaaaaacatgg

SEQ ID NO: 1146 - DNA, 23 bp, Homo sapiens
  source 1..23: mol_type = genomic DNA
aagtgtggaaagcactgggttgg

SEQ ID NO: 1147 - DNA, 23 bp, Homo sapiens
  source 1..23: mol_type = genomic DNA
agaatgatctgcttaacacttgg

SEQ ID NO: 1148 - DNA, 23 bp, Homo sapiens
  source 1..23: mol_type = genomic DNA
tttagctcctcaggctatggagg

SEQ ID NO: 1149 - DNA, 23 bp, Homo sapiens
  source 1..23: mol_type = genomic DNA
atccttcctctcataaatgaggg

SEQ ID NO: 1150 - DNA, 23 bp, Homo sapiens
  source 1..23: mol_type = genomic DNA
gtacaaatattacattaacatgg

SEQ ID NO: 1151 - DNA, 23 bp, Homo sapiens
  source 1..23: mol_type = genomic DNA
gcatgtgttagatacaatgcagg

SEQ ID NO: 1152 - DNA, 23 bp, Homo sapiens
  source 1..23: mol_type = genomic DNA
ttaggagtaattaccacggtggg

SEQ ID NO: 1153 - DNA, 23 bp, Homo sapiens
  source 1..23: mol_type = genomic DNA
cgtgagtcagtaacccctgaagg

SEQ ID NO: 1154 - DNA, 23 bp, Homo sapiens
  source 1..23: mol_type = genomic DNA
ggaaaatataagtcagagggagg

SEQ ID NO: 1155 - DNA, 23 bp, Homo sapiens
  source 1..23: mol_type = genomic DNA
acattatgaggcaaataatgagg

SEQ ID NO: 1156 - DNA, 23 bp, Homo sapiens
  source 1..23: mol_type = genomic DNA
gaatactggcctttactggaggg

SEQ ID NO: 1157 - DNA, 23 bp, Homo sapiens
  source 1..23: mol_type = genomic DNA
gcaaaatgggtgtggtagcgagg

SEQ ID NO: 1158 - DNA, 23 bp, Homo sapiens
  source 1..23: mol_type = genomic DNA
aattactaatgaatgttgggagg

SEQ ID NO: 1159 - DNA, 23 bp, Homo sapiens
  source 1..23: mol_type = genomic DNA
atttctttaggagatactcatgg

SEQ ID NO: 1160 - DNA, 23 bp, Homo sapiens
  source 1..23: mol_type = genomic DNA
ctccatatattctttcagtgtgg

SEQ ID NO: 1161 - DNA, 23 bp, Homo sapiens
  source 1..23: mol_type = genomic DNA
tgtaacaagaaacaaagctaagg

SEQ ID NO: 1162 - DNA, 23 bp, Homo sapiens
  source 1..23: mol_type = genomic DNA
aatgctgcatgtcatatacctgg

SEQ ID NO: 1163 - DNA, 23 bp, Homo sapiens
  source 1..23: mol_type = genomic DNA
ataaactgcagacacttccacgg

SEQ ID NO: 1164 - DNA, 23 bp, Homo sapiens
  source 1..23: mol_type = genomic DNA
gctaaaagccagtgagaagacgg

SEQ ID NO: 1165 - DNA, 23 bp, Homo sapiens
  source 1..23: mol_type = genomic DNA
aatccagatgctaccacaggagg

SEQ ID NO: 1166 - DNA, 23 bp, Homo sapiens
  source 1..23: mol_type = genomic DNA
tgaaaattgagagtagggaacgg

SEQ ID NO: 1167 - DNA, 23 bp, Homo sapiens
  source 1..23: mol_type = genomic DNA
agcccttctcttaagtagcacgg

SEQ ID NO: 1168 - DNA, 23 bp, Homo sapiens
  source 1..23: mol_type = genomic DNA
tgaaggttcaataaataggtcgg

SEQ ID NO: 1169 - DNA, 23 bp, Homo sapiens
  source 1..23: mol_type = genomic DNA
cctctgactgtccatgagagagg

SEQ ID NO: 1170 - DNA, 23 bp, Homo sapiens
  source 1..23: mol_type = genomic DNA
agcttcctagtggccacacaggg

SEQ ID NO: 1171 - DNA, 23 bp, Homo sapiens
  source 1..23: mol_type = genomic DNA
aaaagcttcactgatcaagatgg

SEQ ID NO: 1172 - DNA, 23 bp, Homo sapiens
  source 1..23: mol_type = genomic DNA
ccatattagaagcaagtccaagg

SEQ ID NO: 1173 - DNA, 23 bp, Homo sapiens
  source 1..23: mol_type = genomic DNA
actgatcgtgttgctgacaaagg

SEQ ID NO: 1174 - DNA, 23 bp, Homo sapiens
  source 1..23: mol_type = genomic DNA
cctaaatatacagtacatcaggg

SEQ ID NO: 1175 - DNA, 23 bp, Homo sapiens
  source 1..23: mol_type = genomic DNA
aacttggaaataatttttagggg

SEQ ID NO: 1176 - DNA, 23 bp, Homo sapiens
  source 1..23: mol_type = genomic DNA
ataatcactcacatttcccaagg

SEQ ID NO: 1177 - DNA, 23 bp, Homo sapiens
  source 1..23: mol_type = genomic DNA
aaaataactttggtagacagtgg

SEQ ID NO: 1178 - DNA, 23 bp, Homo sapiens
  source 1..23: mol_type = genomic DNA
attgtacctcacagcatagaggg

SEQ ID NO: 1179 - DNA, 23 bp, Homo sapiens
  source 1..23: mol_type = genomic DNA
aacatattaactagcccccaagg

SEQ ID NO: 1180 - DNA, 23 bp, Homo sapiens
  source 1..23: mol_type = genomic DNA
tttactagatcatcaccggcagg

SEQ ID NO: 1181 - DNA, 23 bp, Homo sapiens
  source 1..23: mol_type = genomic DNA
acacagcacacacgaatgcatgg

SEQ ID NO: 1182 - DNA, 23 bp, Homo sapiens
  source 1..23: mol_type = genomic DNA
tctctttttatagtggtgggggg

SEQ ID NO: 1183 - DNA, 23 bp, Homo sapiens
  source 1..23: mol_type = genomic DNA
actccatccattagtaatcacgg

SEQ ID NO: 1184 - DNA, 23 bp, Homo sapiens
  source 1..23: mol_type = genomic DNA
ataatacccacatcagtagaggg

SEQ ID NO: 1185 - DNA, 23 bp, Homo sapiens
  source 1..23: mol_type = genomic DNA
agtattgtgttactagtagaggg

SEQ ID NO: 1186 - DNA, 23 bp, Homo sapiens
  source 1..23: mol_type = genomic DNA
acagctagtttttttttcagggg

SEQ ID NO: 1187 - DNA, 23 bp, Homo sapiens
  source 1..23: mol_type = genomic DNA
agaaaaatgaagtagagcaaagg

SEQ ID NO: 1188 - DNA, 23 bp, Homo sapiens
  source 1..23: mol_type = genomic DNA
aatagactgctatcctgccatgg

SEQ ID NO: 1189 - DNA, 23 bp, Homo sapiens
  source 1..23: mol_type = genomic DNA
tgagaggaaggatctgcgctagg

SEQ ID NO: 1190 - DNA, 23 bp, Homo sapiens
  source 1..23: mol_type = genomic DNA
tcaatggagattggtgagagggg

SEQ ID NO: 1191 - DNA, 23 bp, Homo sapiens
  source 1..23: mol_type = genomic DNA
aagtaagctgtcattacccaagg

SEQ ID NO: 1192 - DNA, 23 bp, Homo sapiens
  source 1..23: mol_type = genomic DNA
gggaggactagttcttcctaagg

SEQ ID NO: 1193 - DNA, 23 bp, Homo sapiens
  source 1..23: mol_type = genomic DNA
aatgtacaaaaaaaatacaatgg

SEQ ID NO: 1194 - DNA, 23 bp, Homo sapiens
  source 1..23: mol_type = genomic DNA
tttttgctaggagagaaaagtgg

SEQ ID NO: 1195 - DNA, 23 bp, Homo sapiens
  source 1..23: mol_type = genomic DNA
tgatgtggtggataacagcaagg

SEQ ID NO: 1196 - DNA, 23 bp, Homo sapiens
  source 1..23: mol_type = genomic DNA
attgatagcaagatttcaagggg

SEQ ID NO: 1197 - DNA, 23 bp, Homo sapiens
  source 1..23: mol_type = genomic DNA
aattactccaagaaatgtgtagg

SEQ ID NO: 1198 - DNA, 23 bp, Homo sapiens
  source 1..23: mol_type = genomic DNA
gtagctaaaaagtcttgtagagg

SEQ ID NO: 1199 - DNA, 23 bp, Homo sapiens
  source 1..23: mol_type = genomic DNA
gcataattctcaaaaagaggggg

SEQ ID NO: 1200 - DNA, 23 bp, Homo sapiens
  source 1..23: mol_type = genomic DNA
agaactaatccttttcaccatgg

SEQ ID NO: 1201 - DNA, 23 bp, Homo sapiens
  source 1..23: mol_type = genomic DNA
tagagccatgcaaatgagagtgg

SEQ ID NO: 1202 - DNA, 23 bp, Homo sapiens
  source 1..23: mol_type = genomic DNA
gattcccaaaagtaagtgaaggg

SEQ ID NO: 1203 - DNA, 23 bp, Homo sapiens
  source 1..23: mol_type = genomic DNA
attcggaacacagttgagagagg

SEQ ID NO: 1204 - DNA, 23 bp, Homo sapiens
  source 1..23: mol_type = genomic DNA
gagtatggctaataattcaaagg

SEQ ID NO: 1205 - DNA, 23 bp, Homo sapiens
  source 1..23: mol_type = genomic DNA
agtcatccaaatatatcccaggg

SEQ ID NO: 1206 - DNA, 23 bp, Homo sapiens
  source 1..23: mol_type = genomic DNA
catgtgcatattaataagagagg

SEQ ID NO: 1207 - DNA, 23 bp, Homo sapiens
  source 1..23: mol_type = genomic DNA
ccctcaatcccaattctgcaggg

SEQ ID NO: 1208 - DNA, 23 bp, Homo sapiens
  source 1..23: mol_type = genomic DNA
agtggagaaaggcatctctaggg

SEQ ID NO: 1209 - DNA, 23 bp, Homo sapiens
  source 1..23: mol_type = genomic DNA
aaaagcttaaagctaacggaggg

SEQ ID NO: 1210 - DNA, 23 bp, Homo sapiens
  source 1..23: mol_type = genomic DNA
gcagtagtagtagttgtactggg

SEQ ID NO: 1211 - DNA, 23 bp, Homo sapiens
  source 1..23: mol_type = genomic DNA
ctgtgcattggcagtgacagcgg

SEQ ID NO: 1212 - DNA, 23 bp, Homo sapiens
  source 1..23: mol_type = genomic DNA
gtttaaatgcacaatgccaaggg

SEQ ID NO: 1213 - DNA, 23 bp, Homo sapiens
  source 1..23: mol_type = genomic DNA
gtcaaagtagcatcttgctgtgg

SEQ ID NO: 1214 - DNA, 23 bp, Homo sapiens
  source 1..23: mol_type = genomic DNA
aaatatccatctttgtggcaggg

SEQ ID NO: 1215 - DNA, 23 bp, Homo sapiens
  source 1..23: mol_type = genomic DNA
gatactgcatggaactcgggtgg

SEQ ID NO: 1216 - DNA, 23 bp, Homo sapiens
  source 1..23: mol_type = genomic DNA
atgcagcagctgaattctgaagg

SEQ ID NO: 1217 - DNA, 23 bp, Homo sapiens
  source 1..23: mol_type = genomic DNA
gttgtaacaggagaggagctggg

SEQ ID NO: 1218 - DNA, 23 bp, Homo sapiens
  source 1..23: mol_type = genomic DNA
tcacactgagagtaccgctcagg

SEQ ID NO: 1219 - DNA, 23 bp, Homo sapiens
  source 1..23: mol_type = genomic DNA
tattatagctcaatttcaccagg

SEQ ID NO: 1220 - DNA, 23 bp, Homo sapiens
  source 1..23: mol_type = genomic DNA
ttattctaaaatagatatgaggg

SEQ ID NO: 1221 - DNA, 23 bp, Homo sapiens
  source 1..23: mol_type = genomic DNA
aagtatttcataatctctagagg

SEQ ID NO: 1222 - DNA, 23 bp, Homo sapiens
  source 1..23: mol_type = genomic DNA
tcaagaccggtgtggtgaagcgg

SEQ ID NO: 1223 - DNA, 23 bp, Homo sapiens
  source 1..23: mol_type = genomic DNA
gcaagctggcagtctttcaaggg

SEQ ID NO: 1224 - DNA, 23 bp, Homo sapiens
  source 1..23: mol_type = genomic DNA
gaagctttcctcataactgtagg

SEQ ID NO: 1225 - DNA, 23 bp, Homo sapiens
  source 1..23: mol_type = genomic DNA
tagtcacttgctcttccttgcgg

SEQ ID NO: 1226 - DNA, 23 bp, Homo sapiens
  source 1..23: mol_type = genomic DNA
ccatgccatccacccaaccatgg

SEQ ID NO: 1227 - DNA, 23 bp, Homo sapiens
  source 1..23: mol_type = genomic DNA
cagggccatcagctgcctgaagg

SEQ ID NO: 1228 - DNA, 23 bp, Homo sapiens
  source 1..23: mol_type = genomic DNA
ggccagtgcagaacacacctggg

SEQ ID NO: 1229 - DNA, 23 bp, Homo sapiens
  source 1..23: mol_type = genomic DNA
gcaatggtttcttccctcaccgg

SEQ ID NO: 1230 - DNA, 23 bp, Homo sapiens
  source 1..23: mol_type = genomic DNA
gtacagaagtagatcatggaagg

SEQ ID NO: 1231 - DNA, 23 bp, Homo sapiens
  source 1..23: mol_type = genomic DNA
aacaagcttactgatatagaggg

SEQ ID NO: 1232 - DNA, 23 bp, Homo sapiens
  source 1..23: mol_type = genomic DNA
ggcgaaagaatcactgagagtgg

SEQ ID NO: 1233 - DNA, 23 bp, Homo sapiens
  source 1..23: mol_type = genomic DNA
agccaggctacggagcagctcgg

SEQ ID NO: 1234 - DNA, 23 bp, Homo sapiens
  source 1..23: mol_type = genomic DNA
ttgcctctcatatttacagaggg

SEQ ID NO: 1235 - DNA, 23 bp, Homo sapiens
  source 1..23: mol_type = genomic DNA
tatcattacaaatatatgcatgg

SEQ ID NO: 1236 - DNA, 23 bp, Homo sapiens
  source 1..23: mol_type = genomic DNA
tagccaagcacagataaagcagg

SEQ ID NO: 1237 - DNA, 23 bp, Homo sapiens
  source 1..23: mol_type = genomic DNA
agtttatctcctaaatatgaggg

SEQ ID NO: 1238 - DNA, 23 bp, Homo sapiens
  source 1..23: mol_type = genomic DNA
aacaattgaggagccctacaggg

SEQ ID NO: 1239 - DNA, 23 bp, Homo sapiens
  source 1..23: mol_type = genomic DNA
accctccccacacccccacacgg

SEQ ID NO: 1240 - DNA, 23 bp, Homo sapiens
  source 1..23: mol_type = genomic DNA
attttactaatagtgacaagagg

SEQ ID NO: 1241 - DNA, 23 bp, Homo sapiens
  source 1..23: mol_type = genomic DNA
ttatttgcttgttaccctagtgg

SEQ ID NO: 1242 - DNA, 23 bp, Homo sapiens
  source 1..23: mol_type = genomic DNA
tgtgcctatcctaataagcaggg

SEQ ID NO: 1243 - DNA, 23 bp, Homo sapiens
  source 1..23: mol_type = genomic DNA
aaggtctctaaagatagcatagg

SEQ ID NO: 1244 - DNA, 23 bp, Homo sapiens
  source 1..23: mol_type = genomic DNA
agagaattgcaaaatgggtgtgg

SEQ ID NO: 1245 - DNA, 23 bp, Homo sapiens
  source 1..23: mol_type = genomic DNA
atacatctactgctaatgatggg

SEQ ID NO: 1246 - DNA, 23 bp, Homo sapiens
  source 1..23: mol_type = genomic DNA
agttacatattaaacagctaagg

SEQ ID NO: 1247 - DNA, 23 bp, Homo sapiens
  source 1..23: mol_type = genomic DNA
tagttcaaagggggataggacgg

SEQ ID NO: 1248 - DNA, 23 bp, Homo sapiens
  source 1..23: mol_type = genomic DNA
aagtctatatcaaaatatagggg

SEQ ID NO: 1249 - DNA, 23 bp, Homo sapiens
  source 1..23: mol_type = genomic DNA
gctaagttcaagtgaagtagagg

SEQ ID NO: 1250 - DNA, 23 bp, Homo sapiens
  source 1..23: mol_type = genomic DNA
ctatgtagccgaaagttccaagg

SEQ ID NO: 1251 - DNA, 23 bp, Homo sapiens
  source 1..23: mol_type = genomic DNA
aagatggcattgttaggtggtgg

SEQ ID NO: 1252 - DNA, 23 bp, Homo sapiens
  source 1..23: mol_type = genomic DNA
agaaggtcatggaagttaggagg

SEQ ID NO: 1253 - DNA, 23 bp, Homo sapiens
  source 1..23: mol_type = genomic DNA
agatatgtgcggctaacacaggg

SEQ ID NO: 1254 - DNA, 23 bp, Homo sapiens
  source 1..23: mol_type = genomic DNA
ccattctctagacttgcataggg

SEQ ID NO: 1255 - DNA, 23 bp, Homo sapiens
  source 1..23: mol_type = genomic DNA
ttactttgtcagtacttcagggg

SEQ ID NO: 1256 - DNA, 23 bp, Homo sapiens
  source 1..23: mol_type = genomic DNA
gtactagccatcaaaatttgggg

SEQ ID NO: 1257 - DNA, 23 bp, Homo sapiens
  source 1..23: mol_type = genomic DNA
gattcatgcaaaactagactagg

SEQ ID NO: 1258 - DNA, 23 bp, Homo sapiens
  source 1..23: mol_type = genomic DNA
gccctcctttgtaacctctgagg

SEQ ID NO: 1259 - DNA, 23 bp, Homo sapiens
  source 1..23: mol_type = genomic DNA
cataaaatctaccagtaggtggg

SEQ ID NO: 1260 - DNA, 23 bp, Homo sapiens
  source 1..23: mol_type = genomic DNA
agtgcaacatgattggacatagg

SEQ ID NO: 1261 - DNA, 23 bp, Homo sapiens
  source 1..23: mol_type = genomic DNA
gctttagaaccaaaagtcgatgg

SEQ ID NO: 1262 - DNA, 23 bp, Homo sapiens
  source 1..23: mol_type = genomic DNA
gacctcagaggttacaaaggagg

SEQ ID NO: 1263 - DNA, 23 bp, Homo sapiens
  source 1..23: mol_type = genomic DNA
attgctgtgctagattacactgg

SEQ ID NO: 1264 - DNA, 23 bp, Homo sapiens
  source 1..23: mol_type = genomic DNA
tcagctttgtaactcctcaaagg

SEQ ID NO: 1265 - DNA, 23 bp, Homo sapiens
  source 1..23: mol_type = genomic DNA
ttagtgaacgtatttcaacttgg

SEQ ID NO: 1266 - DNA, 23 bp, Homo sapiens
  source 1..23: mol_type = genomic DNA
accttaaaacaagttacagaggg

SEQ ID NO: 1267 - DNA, 23 bp, Homo sapiens
  source 1..23: mol_type = genomic DNA
cttgcatcagtttctaaacgagg

SEQ ID NO: 1268 - DNA, 23 bp, Homo sapiens
  source 1..23: mol_type = genomic DNA
atgatgccttgagtgtggctggg

SEQ ID NO: 1269 - DNA, 23 bp, Homo sapiens
  source 1..23: mol_type = genomic DNA
aacaaagcccagaagaatgaggg

SEQ ID NO: 1270 - DNA, 23 bp, Homo sapiens
  source 1..23: mol_type = genomic DNA
gaactcaaggttttcaacaaggg

SEQ ID NO: 1271 - DNA, 23 bp, Homo sapiens
  source 1..23: mol_type = genomic DNA
acattgaatggcaagtccaaagg

SEQ ID NO: 1272 - DNA, 23 bp, Homo sapiens
  source 1..23: mol_type = genomic DNA
aatggctgcatgataattagtgg

SEQ ID NO: 1273 - DNA, 23 bp, Homo sapiens
  source 1..23: mol_type = genomic DNA
agcttccttttacatccaagagg

SEQ ID NO: 1274 - DNA, 23 bp, Homo sapiens
  source 1..23: mol_type = genomic DNA
tagggcttacttatgatgcaagg

SEQ ID NO: 1275 - DNA, 23 bp, Homo sapiens
  source 1..23: mol_type = genomic DNA
ttggcttagaaaacatgagtggg

SEQ ID NO: 1276 - DNA, 23 bp, Homo sapiens
  source 1..23: mol_type = genomic DNA
ttatgaatacaaagagctaaggg

SEQ ID NO: 1277 - DNA, 23 bp, Homo sapiens
  source 1..23: mol_type = genomic DNA
aataattgtagtagaaaccaagg

SEQ ID NO: 1278 - DNA, 23 bp, Homo sapiens
  source 1..23: mol_type = genomic DNA
aatgggagaaatccaagcatagg

SEQ ID NO: 1279 - DNA, 23 bp, Homo sapiens
  source 1..23: mol_type = genomic DNA
acatcttgaatgaaaacaagagg

SEQ ID NO: 1280 - DNA, 23 bp, Homo sapiens
  source 1..23: mol_type = genomic DNA
actcctaaccctttagccaaagg

SEQ ID NO: 1281 - DNA, 23 bp, Homo sapiens
  source 1..23: mol_type = genomic DNA
cttaactctctgttgtgaggggg

SEQ ID NO: 1282 - DNA, 23 bp, Homo sapiens
  source 1..23: mol_type = genomic DNA
ttagtagacgctgaagggcaggg

SEQ ID NO: 1283 - DNA, 23 bp, Homo sapiens
  source 1..23: mol_type = genomic DNA
cctctttgagcagagatcaaggg

SEQ ID NO: 1284 - DNA, 23 bp, Homo sapiens
  source 1..23: mol_type = genomic DNA
ctaagcccgtgtctatgaagtgg

SEQ ID NO: 1285 - DNA, 23 bp, Homo sapiens
  source 1..23: mol_type = genomic DNA
tttaaatactgaagttcacatgg

SEQ ID NO: 1286 - DNA, 23 bp, Homo sapiens
  source 1..23: mol_type = genomic DNA
tctgccaaaagctcaatatgagg

SEQ ID NO: 1287 - DNA, 23 bp, Homo sapiens
  source 1..23: mol_type = genomic DNA
tgcacagacatcttacaacatgg

SEQ ID NO: 1288 - DNA, 23 bp, Homo sapiens
  source 1..23: mol_type = genomic DNA
agacatttcaaattctgcggagg

SEQ ID NO: 1289 - DNA, 23 bp, Homo sapiens
  source 1..23: mol_type = genomic DNA
ctgtaactggagacaagaagggg

SEQ ID NO: 1290 - DNA, 23 bp, Homo sapiens
  source 1..23: mol_type = genomic DNA
catagggaggaatcccacaatgg

SEQ ID NO: 1291 - DNA, 23 bp, Homo sapiens
  source 1..23: mol_type = genomic DNA
ggctggttaaaagctttcagagg

SEQ ID NO: 1292 - DNA, 23 bp, Homo sapiens
  source 1..23: mol_type = genomic DNA
gccactgttcattttaactgggg

SEQ ID NO: 1293 - DNA, 23 bp, Homo sapiens
  source 1..23: mol_type = genomic DNA
ccataaaaagaatggtacaatgg

SEQ ID NO: 1294 - DNA, 23 bp, Homo sapiens
  source 1..23: mol_type = genomic DNA
agaggaaaggaggtgacctaggg

SEQ ID NO: 1295 - DNA, 23 bp, Homo sapiens
  source 1..23: mol_type = genomic DNA
actaattaatacttgccagtcgg

SEQ ID NO: 1296 - DNA, 23 bp, Homo sapiens
  source 1..23: mol_type = genomic DNA
gttcaatcctatgataatcaggg

SEQ ID NO: 1297 - DNA, 23 bp, Homo sapiens
  source 1..23: mol_type = genomic DNA
aactcacaaatattgttgcaggg

SEQ ID NO: 1298 - DNA, 23 bp, Homo sapiens
  source 1..23: mol_type = genomic DNA
gaaatggcttcggagatacatgg

SEQ ID NO: 1299 - DNA, 23 bp, Homo sapiens
  source 1..23: mol_type = genomic DNA
aatcaggacagtaatttggtagg

SEQ ID NO: 1300 - DNA, 23 bp, Homo sapiens
  source 1..23: mol_type = genomic DNA
ttgtttgagtaacctagctgagg

SEQ ID NO: 1301 - DNA, 23 bp, Homo sapiens
  source 1..23: mol_type = genomic DNA
cctccaacaatagctcaagcagg

SEQ ID NO: 1302 - DNA, 23 bp, Homo sapiens
  source 1..23: mol_type = genomic DNA
gtgagttattgtaatagcaatgg

SEQ ID NO: 1303 - DNA, 23 bp, Homo sapiens
  source 1..23: mol_type = genomic DNA
acattctgtttttatcccagtgg

SEQ ID NO: 1304 - DNA, 23 bp, Homo sapiens
  source 1..23: mol_type = genomic DNA
gcatctacatactctaacatggg

SEQ ID NO: 1305 - DNA, 23 bp, Homo sapiens
  source 1..23: mol_type = genomic DNA
tggaggcctacaacctctgaagg

SEQ ID NO: 1306 - DNA, 23 bp, Homo sapiens
  source 1..23: mol_type = genomic DNA
ggaaccattagtacttacaatgg

SEQ ID NO: 1307 - DNA, 23 bp, Homo sapiens
  source 1..23: mol_type = genomic DNA
gaacatttaatatataggaatgg

SEQ ID NO: 1308 - DNA, 23 bp, Homo sapiens
  source 1..23: mol_type = genomic DNA
aaaccagtattttcaaagcgtgg

SEQ ID NO: 1309 - DNA, 23 bp, Homo sapiens
  source 1..23: mol_type = genomic DNA
tcggatgctggccataaacaggg

SEQ ID NO: 1310 - DNA, 23 bp, Homo sapiens
  source 1..23: mol_type = genomic DNA
ggaggtagcagcaataagctggg

SEQ ID NO: 1311 - DNA, 23 bp, Homo sapiens
  source 1..23: mol_type = genomic DNA
acaaattccaataaatgatgagg

SEQ ID NO: 1312 - DNA, 23 bp, Homo sapiens
  source 1..23: mol_type = genomic DNA
aagcccttgaagaggagttgagg

SEQ ID NO: 1313 - DNA, 23 bp, Homo sapiens
  source 1..23: mol_type = genomic DNA
acatgggcaacaaattagatggg

SEQ ID NO: 1314 - DNA, 23 bp, Homo sapiens
  source 1..23: mol_type = genomic DNA
gctgctcaggaacatcctcatgg

SEQ ID NO: 1315 - DNA, 23 bp, Homo sapiens
  source 1..23: mol_type = genomic DNA
ggattcccaaaagtaagtgaagg

SEQ ID NO: 1316 - DNA, 23 bp, Homo sapiens
  source 1..23: mol_type = genomic DNA
tgccagcatatgtagtaagtagg

SEQ ID NO: 1317 - DNA, 23 bp, Homo sapiens
  source 1..23: mol_type = genomic DNA
tatccttcacctctctcaagagg

SEQ ID NO: 1318 - DNA, 23 bp, Homo sapiens
  source 1..23: mol_type = genomic DNA
gctgggaatagaagatgtcaggg

SEQ ID NO: 1319 - DNA, 23 bp, Homo sapiens
  source 1..23: mol_type = genomic DNA
agactattaagaagaactcaagg

SEQ ID NO: 1320 - DNA, 23 bp, Homo sapiens
  source 1..23: mol_type = genomic DNA
atgtaaactaataaaaacgttgg

SEQ ID NO: 1321 - DNA, 23 bp, Homo sapiens
  source 1..23: mol_type = genomic DNA
gttgatatgctaaataaaagggg

SEQ ID NO: 1322 - DNA, 23 bp, Homo sapiens
  source 1..23: mol_type = genomic DNA
aatttattcagtatgtcaccagg

SEQ ID NO: 1323 - DNA, 23 bp, Homo sapiens
  source 1..23: mol_type = genomic DNA
tagactaaattcaaagactgagg

SEQ ID NO: 1324 - DNA, 23 bp, Homo sapiens
  source 1..23: mol_type = genomic DNA
atcatgaccttacaagaggaagg

SEQ ID NO: 1325 - DNA, 23 bp, Homo sapiens
  source 1..23: mol_type = genomic DNA
tgatttttcattgaactcagagg

SEQ ID NO: 1326 - DNA, 23 bp, Homo sapiens
  source 1..23: mol_type = genomic DNA
gtagacatctcactgctcatggg

SEQ ID NO: 1327 - DNA, 23 bp, Homo sapiens
  source 1..23: mol_type = genomic DNA
gaaagaagtggcgtttgcagtgg

SEQ ID NO: 1328 - DNA, 23 bp, Homo sapiens
  source 1..23: mol_type = genomic DNA
atacaaaacaaaacatgagaggg

SEQ ID NO: 1329 - DNA, 23 bp, Homo sapiens
  source 1..23: mol_type = genomic DNA
gtctattcattcaggctaagggg

SEQ ID NO: 1330 - DNA, 23 bp, Homo sapiens
  source 1..23: mol_type = genomic DNA
tgtatttataaacaaccctaagg

SEQ ID NO: 1331 - DNA, 23 bp, Homo sapiens
  source 1..23: mol_type = genomic DNA
tggggagaggaattggtaagggg

SEQ ID NO: 1332 - DNA, 23 bp, Homo sapiens
  source 1..23: mol_type = genomic DNA
tcttgtacatcttaacctcaagg

SEQ ID NO: 1333 - DNA, 23 bp, Homo sapiens
  source 1..23: mol_type = genomic DNA
tagccaccttctgtatcagaagg

SEQ ID NO: 1334 - DNA, 23 bp, Homo sapiens
  source 1..23: mol_type = genomic DNA
ttccgatgatcctttaactgtgg

SEQ ID NO: 1335 - DNA, 23 bp, Homo sapiens
  source 1..23: mol_type = genomic DNA
atgaagagacaagctttccaggg

SEQ ID NO: 1336 - DNA, 23 bp, Homo sapiens
  source 1..23: mol_type = genomic DNA
gcattgagcacactctacaaggg

SEQ ID NO: 1337 - DNA, 23 bp, Homo sapiens
  source 1..23: mol_type = genomic DNA
cacaggagctctaagtccagtgg

SEQ ID NO: 1338 - DNA, 23 bp, Homo sapiens
  source 1..23: mol_type = genomic DNA
ggaaaacaaggtaaagtgagtgg

SEQ ID NO: 1339 - DNA, 23 bp, Homo sapiens
  source 1..23: mol_type = genomic DNA
ggtgaccacagtttaaagaaggg

SEQ ID NO: 1340 - DNA, 23 bp, Homo sapiens
  source 1..23: mol_type = genomic DNA
acggtgttatctttaaaacctgg

SEQ ID NO: 1341 - DNA, 23 bp, Homo sapiens
  source 1..23: mol_type = genomic DNA
gacaagcagaacaatttcaaggg

SEQ ID NO: 1342 - DNA, 23 bp, Homo sapiens
  source 1..23: mol_type = genomic DNA
ctaagggaacatcttgctgtagg

SEQ ID NO: 1343 - DNA, 23 bp, Homo sapiens
  source 1..23: mol_type = genomic DNA
tggatcagaattgaaactgaggg

SEQ ID NO: 1344 - DNA, 23 bp, Homo sapiens
  source 1..23: mol_type = genomic DNA
aagatgtgagctataaaagaggg

SEQ ID NO: 1345 - DNA, 23 bp, Homo sapiens
  source 1..23: mol_type = genomic DNA
gcctgaaattggtaagaggacgg

SEQ ID NO: 1346 - DNA, 23 bp, Homo sapiens
  source 1..23: mol_type = genomic DNA
caagtttcctccctagaggaggg

SEQ ID NO: 1347 - DNA, 23 bp, Homo sapiens
  source 1..23: mol_type = genomic DNA
tatgttgcaatttgaagacaggg

SEQ ID NO: 1348 - DNA, 23 bp, Homo sapiens
  source 1..23: mol_type = genomic DNA
aattccaagggacttttgagggg

SEQ ID NO: 1349 - DNA, 23 bp, Homo sapiens
  source 1..23: mol_type = genomic DNA
gatacagtgaattcacagcttgg

SEQ ID NO: 1350 - DNA, 23 bp, Homo sapiens
  source 1..23: mol_type = genomic DNA
ctgttcagtaagtgtctgcaggg

SEQ ID NO: 1351 - DNA, 23 bp, Homo sapiens
  source 1..23: mol_type = genomic DNA
aagtcaacaacatacatggatgg

SEQ ID NO: 1352 - DNA, 23 bp, Homo sapiens
  source 1..23: mol_type = genomic DNA
tcttgtgcgtgctaaagcatagg

SEQ ID NO: 1353 - DNA, 23 bp, Homo sapiens
  source 1..23: mol_type = genomic DNA
caaaacaaaagccaagaagaggg

SEQ ID NO: 1354 - DNA, 23 bp, Homo sapiens
  source 1..23: mol_type = genomic DNA
tgcccagtggtgggtcagagggg

SEQ ID NO: 1355 - DNA, 23 bp, Homo sapiens
  source 1..23: mol_type = genomic DNA
ccaaaattgatagaaaacattgg

SEQ ID NO: 1356 - DNA, 23 bp, Homo sapiens
  source 1..23: mol_type = genomic DNA
taatatgctgtaatatatgaggg

SEQ ID NO: 1357 - DNA, 23 bp, Homo sapiens
  source 1..23: mol_type = genomic DNA
gataatatcaaagactcttgggg

SEQ ID NO: 1358 - DNA, 23 bp, Homo sapiens
  source 1..23: mol_type = genomic DNA
gtcactactagagtatgcactgg

SEQ ID NO: 1359 - DNA, 23 bp, Homo sapiens
  source 1..23: mol_type = genomic DNA
gccataggccatctccatagtgg

SEQ ID NO: 1360 - DNA, 23 bp, Homo sapiens
  source 1..23: mol_type = genomic DNA
cacctcttcaaaatagtgtgtgg

SEQ ID NO: 1361 - DNA, 23 bp, Homo sapiens
  source 1..23: mol_type = genomic DNA
acacatatgtatatatcagaagg

SEQ ID NO: 1362 - DNA, 23 bp, Homo sapiens
  source 1..23: mol_type = genomic DNA
tttctataatctattgccaaggg

SEQ ID NO: 1363 - DNA, 23 bp, Homo sapiens
  source 1..23: mol_type = genomic DNA
ataagaacatacatagccaaagg

SEQ ID NO: 1364 - DNA, 23 bp, Homo sapiens
  source 1..23: mol_type = genomic DNA
gctttgtgaaacaattggcaagg

SEQ ID NO: 1365 - DNA, 23 bp, Homo sapiens
  source 1..23: mol_type = genomic DNA
actccatcagagagttctgtagg

SEQ ID NO: 1366 - DNA, 23 bp, Homo sapiens
  source 1..23: mol_type = genomic DNA
aggatagcttacttatacagggg

SEQ ID NO: 1367 - DNA, 23 bp, Homo sapiens
  source 1..23: mol_type = genomic DNA
ctttgttacatttagaaccacgg

SEQ ID NO: 1368 - DNA, 23 bp, Homo sapiens
  source 1..23: mol_type = genomic DNA
ttttcccacttcatagacacggg

SEQ ID NO: 1369 - DNA, 23 bp, Homo sapiens
  source 1..23: mol_type = genomic DNA
atgaagttctacattgaactggg

SEQ ID NO: 1370 - DNA, 23 bp, Homo sapiens
  source 1..23: mol_type = genomic DNA
tttaaatgatatttccttggggg

SEQ ID NO: 1371 - DNA, 23 bp, Homo sapiens
  source 1..23: mol_type = genomic DNA
cagaagttactgacttgaggagg

SEQ ID NO: 1372 - DNA, 23 bp, Homo sapiens
  source 1..23: mol_type = genomic DNA
tctgtactaagatcggtgacagg

SEQ ID NO: 1373 - DNA, 23 bp, Homo sapiens
  source 1..23: mol_type = genomic DNA
taatacaaagaaattgcaagtgg

SEQ ID NO: 1374 - DNA, 23 bp, Homo sapiens
  source 1..23: mol_type = genomic DNA
tgagagatgagcaaatagcctgg

SEQ ID NO: 1375 - DNA, 23 bp, Homo sapiens
  source 1..23: mol_type = genomic DNA
gggctgaagcccatgctgagggg

SEQ ID NO: 1376 - DNA, 23 bp, Homo sapiens
  source 1..23: mol_type = genomic DNA
tgaacaggaggtggatcgaaagg

SEQ ID NO: 1377 - DNA, 23 bp, Homo sapiens
  source 1..23: mol_type = genomic DNA
ttcaggaaaatataagtcagagg

SEQ ID NO: 1378 - DNA, 23 bp, Homo sapiens
  source 1..23: mol_type = genomic DNA
tttaacatcagaaagaacgttgg

SEQ ID NO: 1379 - DNA, 23 bp, Homo sapiens
  source 1..23: mol_type = genomic DNA
atagagaatttttaacacctagg

SEQ ID NO: 1380 - DNA, 23 bp, Homo sapiens
  source 1..23: mol_type = genomic DNA
gtggaggcaaaggaacagacagg

SEQ ID NO: 1381 - DNA, 23 bp, Homo sapiens
  source 1..23: mol_type = genomic DNA
tcaacacagtaactgatgccagg

SEQ ID NO: 1382 - DNA, 23 bp, Homo sapiens
  source 1..23: mol_type = genomic DNA
agaactctgctcaagctgaaagg

SEQ ID NO: 1383 - DNA, 23 bp, Homo sapiens
  source 1..23: mol_type = genomic DNA
cacataataatactatctaaggg

SEQ ID NO: 1384 - DNA, 23 bp, Homo sapiens
  source 1..23: mol_type = genomic DNA
ataaacaaatacatatctaaggg

SEQ ID NO: 1385 - DNA, 23 bp, Homo sapiens
  source 1..23: mol_type = genomic DNA
tgtttgttgccaggaaacacagg

SEQ ID NO: 1386 - DNA, 23 bp, Homo sapiens
  source 1..23: mol_type = genomic DNA
attttggtaaaatatggtgaagg

SEQ ID NO: 1387 - DNA, 23 bp, Homo sapiens
  source 1..23: mol_type = genomic DNA
ggagcttgcaaagggactgtagg

SEQ ID NO: 1388 - DNA, 23 bp, Homo sapiens
  source 1..23: mol_type = genomic DNA
ttattgttggctttaaaaggggg

SEQ ID NO: 1389 - DNA, 23 bp, Homo sapiens
  source 1..23: mol_type = genomic DNA
tagaataaatctgagctaggagg

SEQ ID NO: 1390 - DNA, 23 bp, Homo sapiens
  source 1..23: mol_type = genomic DNA
atctcatacaccttttgctgggg

SEQ ID NO: 1391 - DNA, 23 bp, Homo sapiens
  source 1..23: mol_type = genomic DNA
ccaaagccagtttacttctgggg

SEQ ID NO: 1392 - DNA, 23 bp, Homo sapiens
  source 1..23: mol_type = genomic DNA
ctcttactcatagtgataagggg

SEQ ID NO: 1393 - DNA, 23 bp, Homo sapiens
  source 1..23: mol_type = genomic DNA
attgttctgataacccaagaggg

SEQ ID NO: 1394 - DNA, 23 bp, Homo sapiens
  source 1..23: mol_type = genomic DNA
aagttccatgtcctagctcgagg

SEQ ID NO: 1395 - DNA, 23 bp, Homo sapiens
  source 1..23: mol_type = genomic DNA
cccaattgtactgtgcagcatgg

SEQ ID NO: 1396 - DNA, 23 bp, Homo sapiens
  source 1..23: mol_type = genomic DNA
tcattaaattggagatcgaaagg

SEQ ID NO: 1397 - DNA, 23 bp, Homo sapiens
  source 1..23: mol_type = genomic DNA
ggagcttccactaggccagaggg

SEQ ID NO: 1398 - DNA, 23 bp, Homo sapiens
  source 1..23: mol_type = genomic DNA
tacagtagtcagttgaaatgggg

SEQ ID NO: 1399 - DNA, 23 bp, Homo sapiens
  source 1..23: mol_type = genomic DNA
tagctggtagattaaagcaaagg

SEQ ID NO: 1400 - DNA, 23 bp, Homo sapiens
  source 1..23: mol_type = genomic DNA
tttcaaatagaagctaagaaggg

SEQ ID NO: 1401 - DNA, 23 bp, Homo sapiens
  source 1..23: mol_type = genomic DNA
acaagtttcctccctagaggagg

SEQ ID NO: 1402 - DNA, 23 bp, Homo sapiens
  source 1..23: mol_type = genomic DNA
gtatgtgctagcgtggatgatgg

SEQ ID NO: 1403 - DNA, 23 bp, Homo sapiens
  source 1..23: mol_type = genomic DNA
atttctggttcatataaaggtgg

SEQ ID NO: 1404 - DNA, 23 bp, Homo sapiens
  source 1..23: mol_type = genomic DNA
ccctttcactggtattagggagg

SEQ ID NO: 1405 - DNA, 23 bp, Homo sapiens
  source 1..23: mol_type = genomic DNA
ctgagggtgggaaaatgccatgg

SEQ ID NO: 1406 - DNA, 23 bp, Homo sapiens
  source 1..23: mol_type = genomic DNA
tttatactaactatgggtggggg

SEQ ID NO: 1407 - DNA, 23 bp, Homo sapiens
  source 1..23: mol_type = genomic DNA
aacactatctggctgcctgaggg

SEQ ID NO: 1408 - DNA, 23 bp, Homo sapiens
  source 1..23: mol_type = genomic DNA
gtctatcactcaaggtacaaagg

SEQ ID NO: 1409 - DNA, 23 bp, Homo sapiens
  source 1..23: mol_type = genomic DNA
gtgtagaaaccattctgccaggg

SEQ ID NO: 1410 - DNA, 23 bp, Homo sapiens
  source 1..23: mol_type = genomic DNA
ttattcacccttgtcaacaaagg

SEQ ID NO: 1411 - DNA, 23 bp, Homo sapiens
  source 1..23: mol_type = genomic DNA
tattattttttacattctggagg

SEQ ID NO: 1412 - DNA, 23 bp, Homo sapiens
  source 1..23: mol_type = genomic DNA
ctatcctaataagcaggggatgg

SEQ ID NO: 1413 - DNA, 23 bp, Homo sapiens
  source 1..23: mol_type = genomic DNA
tcagacctcagaggttacaaagg

SEQ ID NO: 1414 - DNA, 23 bp, Homo sapiens
  source 1..23: mol_type = genomic DNA
caaggaagttcagagatgtaggg

SEQ ID NO: 1415 - DNA, 23 bp, Homo sapiens
  source 1..23: mol_type = genomic DNA
gtactcaatcctttgatggaagg

SEQ ID NO: 1416 - DNA, 23 bp, Homo sapiens
  source 1..23: mol_type = genomic DNA
tgagagaggccagacttgcaggg

SEQ ID NO: 1417 - DNA, 23 bp, Homo sapiens
  source 1..23: mol_type = genomic DNA
gaaatgtgtacaaagttaggagg

SEQ ID NO: 1418 - DNA, 23 bp, Homo sapiens
  source 1..23: mol_type = genomic DNA
actacatccataatcagagaagg

SEQ ID NO: 1419 - DNA, 23 bp, Homo sapiens
  source 1..23: mol_type = genomic DNA
tcacattccaaacccagcctagg

SEQ ID NO: 1420 - DNA, 23 bp, Homo sapiens
  source 1..23: mol_type = genomic DNA
tgttaattggaggttgacaaggg

SEQ ID NO: 1421 - DNA, 23 bp, Homo sapiens
  source 1..23: mol_type = genomic DNA
ttatatgctttgatcagatgggg

SEQ ID NO: 1422 - DNA, 23 bp, Homo sapiens
  source 1..23: mol_type = genomic DNA
atcttgctgtaggcagcctgggg

SEQ ID NO: 1423 - DNA, 23 bp, Homo sapiens
  source 1..23: mol_type = genomic DNA
ccactgttcattttaactggggg

SEQ ID NO: 1424 - DNA, 23 bp, Homo sapiens
  source 1..23: mol_type = genomic DNA
aaagtaacattggccaaagaggg

SEQ ID NO: 1425 - DNA, 23 bp, Homo sapiens
  source 1..23: mol_type = genomic DNA
tttcatttggagagaacaggagg

SEQ ID NO: 1426 - DNA, 23 bp, Homo sapiens
  source 1..23: mol_type = genomic DNA
ttgattgataagttatgccaggg

SEQ ID NO: 1427 - DNA, 23 bp, Homo sapiens
  source 1..23: mol_type = genomic DNA
agaggagatattaccccagaagg

SEQ ID NO: 1428 - DNA, 23 bp, Homo sapiens
  source 1..23: mol_type = genomic DNA
ttggggagaggaattggtaaggg

SEQ ID NO: 1429 - DNA, 23 bp, Homo sapiens
  source 1..23: mol_type = genomic DNA
ctactgaaatcatacactaacgg

SEQ ID NO: 1430 - DNA, 23 bp, Homo sapiens
  source 1..23: mol_type = genomic DNA
atcatactctaattcacagaagg

SEQ ID NO: 1431 - DNA, 23 bp, Homo sapiens
  source 1..23: mol_type = genomic DNA
ttaggaatatggagcaatgaggg

SEQ ID NO: 1432 - DNA, 23 bp, Homo sapiens
  source 1..23: mol_type = genomic DNA
atttaaaccacagttctcaaagg

SEQ ID NO: 1433 - DNA, 23 bp, Homo sapiens
  source 1..23: mol_type = genomic DNA
tattcccttctcaacagcctagg

SEQ ID NO: 1434 - DNA, 23 bp, Homo sapiens
  source 1..23: mol_type = genomic DNA
tgcagcctaacagataaagatgg

SEQ ID NO: 1435 - DNA, 23 bp, Homo sapiens
  source 1..23: mol_type = genomic DNA
tgatggacacattagtgagtagg

SEQ ID NO: 1436 - DNA, 23 bp, Homo sapiens
  source 1..23: mol_type = genomic DNA
ttgaagatgggcgcttccaaagg

SEQ ID NO: 1437 - DNA, 23 bp, Homo sapiens
  source 1..23: mol_type = genomic DNA
tttcacagcaatacattttgggg

SEQ ID NO: 1438 - DNA, 23 bp, Homo sapiens
  source 1..23: mol_type = genomic DNA
taccacagttaaaggatcatcgg

SEQ ID NO: 1439 - DNA, 23 bp, Homo sapiens
  source 1..23: mol_type = genomic DNA
aatgtattagtactgttgtgtgg

SEQ ID NO: 1440 - DNA, 23 bp, Homo sapiens
  source 1..23: mol_type = genomic DNA
acttaacaattattatctagggg

SEQ ID NO: 1441 - DNA, 23 bp, Homo sapiens
  source 1..23: mol_type = genomic DNA
ctaatgtgtccatcacatgcagg

SEQ ID NO: 1442 - DNA, 23 bp, Homo sapiens
  source 1..23: mol_type = genomic DNA
gaccatctctacatacagaatgg

SEQ ID NO: 1443 - DNA, 23 bp, Homo sapiens
  source 1..23: mol_type = genomic DNA
acatctaagatatcccaatacgg

SEQ ID NO: 1444 - DNA, 23 bp, Homo sapiens
  source 1..23: mol_type = genomic DNA
ttacgccttttagaagaggaggg

SEQ ID NO: 1445 - DNA, 23 bp, Homo sapiens
  source 1..23: mol_type = genomic DNA
tatgcaaattaatttttcagtgg

SEQ ID NO: 1446 - DNA, 23 bp, Homo sapiens
  source 1..23: mol_type = genomic DNA
tttttgaaagaaggactagtcgg

SEQ ID NO: 1447 - DNA, 23 bp, Homo sapiens
  source 1..23: mol_type = genomic DNA
tctgaagactggctagactaggg

SEQ ID NO: 1448 - DNA, 23 bp, Homo sapiens
  source 1..23: mol_type = genomic DNA
ggaggtattgtactttgccaagg

SEQ ID NO: 1449 - DNA, 23 bp, Homo sapiens
  source 1..23: mol_type = genomic DNA
ccaaaatctaacgcagcacaagg

SEQ ID NO: 1450 - DNA, 23 bp, Homo sapiens
  source 1..23: mol_type = genomic DNA
ggagagagagacatgtaccttgg

SEQ ID NO: 1451 - DNA, 23 bp, Homo sapiens
  source 1..23: mol_type = genomic DNA
cttttggttaaagagtaatgagg

SEQ ID NO: 1452 - DNA, 23 bp, Homo sapiens
  source 1..23: mol_type = genomic DNA
ttgcaaattgttatagaccaagg

SEQ ID NO: 1453 - DNA, 23 bp, Homo sapiens
  source 1..23: mol_type = genomic DNA
ccatatgtcattattagctgcgg

SEQ ID NO: 1454 - DNA, 23 bp, Homo sapiens
  source 1..23: mol_type = genomic DNA
gtcttgtgcagtattagtagtgg

SEQ ID NO: 1455 - DNA, 23 bp, Homo sapiens
  source 1..23: mol_type = genomic DNA
gatattgtaggcatattcgatgg

SEQ ID NO: 1456 - DNA, 23 bp, Homo sapiens
  source 1..23: mol_type = genomic DNA
tgcctaccaagagaagaagaggg

SEQ ID NO: 1457 - DNA, 23 bp, Homo sapiens
  source 1..23: mol_type = genomic DNA
tctgctcagatcattcaaaaggg

SEQ ID NO: 1458 - DNA, 23 bp, Homo sapiens
  source 1..23: mol_type = genomic DNA
actcaattaactattcagactgg

SEQ ID NO: 1459 - DNA, 23 bp, Homo sapiens
  source 1..23: mol_type = genomic DNA
ccacagggacagaagtaagcggg

SEQ ID NO: 1460 - DNA, 23 bp, Homo sapiens
  source 1..23: mol_type = genomic DNA
aagtgattacaccttgtactggg

SEQ ID NO: 1461 - DNA, 23 bp, Homo sapiens
  source 1..23: mol_type = genomic DNA
atacctactcctctttgctaagg

SEQ ID NO: 1462 - DNA, 23 bp, Homo sapiens
  source 1..23: mol_type = genomic DNA
tatctgagctgttacaaaagtgg

SEQ ID NO: 1463 - DNA, 23 bp, Homo sapiens
  source 1..23: mol_type = genomic DNA
gggtttctggagaccgagaaggg

SEQ ID NO: 1464 - DNA, 23 bp, Homo sapiens
  source 1..23: mol_type = genomic DNA
tctacatcacgataatatgttgg

SEQ ID NO: 1465 - DNA, 23 bp, Homo sapiens
  source 1..23: mol_type = genomic DNA
taacttccattgcctatcagtgg

SEQ ID NO: 1466 - DNA, 23 bp, Homo sapiens
  source 1..23: mol_type = genomic DNA
gtcttcttttaaaaatacaaagg

SEQ ID NO: 1467 - DNA, 23 bp, Homo sapiens
  source 1..23: mol_type = genomic DNA
ggaattatcatctcagccgcagg

SEQ ID NO: 1468 - DNA, 23 bp, Homo sapiens
  source 1..23: mol_type = genomic DNA
cacttgctcttccttgcggtagg

SEQ ID NO: 1469 - DNA, 23 bp, Homo sapiens
  source 1..23: mol_type = genomic DNA
acctgtttactacaaatcaaagg

SEQ ID NO: 1470 - DNA, 23 bp, Homo sapiens
  source 1..23: mol_type = genomic DNA
ttttaaggcattctgtagtgagg

SEQ ID NO: 1471 - DNA, 23 bp, Homo sapiens
  source 1..23: mol_type = genomic DNA
tttctcgtgttcaagaggcatgg

SEQ ID NO: 1472 - DNA, 23 bp, Homo sapiens
  source 1..23: mol_type = genomic DNA
tatttattataggatgtgaaagg

SEQ ID NO: 1473 - DNA, 23 bp, Homo sapiens
  source 1..23: mol_type = genomic DNA
acccacatcagtagagggcatgg

SEQ ID NO: 1474 - DNA, 23 bp, Homo sapiens
  source 1..23: mol_type = genomic DNA
gctgacacaactttgtccccagg

SEQ ID NO: 1475 - DNA, 23 bp, Homo sapiens
  source 1..23: mol_type = genomic DNA
ttaaattcaagtctctcgaaagg

SEQ ID NO: 1476 - DNA, 23 bp, Homo sapiens
  source 1..23: mol_type = genomic DNA
cagcagtcctcagtaactcaggg

SEQ ID NO: 1477 - DNA, 23 bp, Homo sapiens
  source 1..23: mol_type = genomic DNA
atgtatgtgtgcgtgtacatagg

SEQ ID NO: 1478 - DNA, 23 bp, Homo sapiens
  source 1..23: mol_type = genomic DNA
atacaggtttaaatattgcatgg

SEQ ID NO: 1479 - DNA, 23 bp, Homo sapiens
  source 1..23: mol_type = genomic DNA
ttcggaacacagttgagagaggg

SEQ ID NO: 1480 - DNA, 23 bp, Homo sapiens
  source 1..23: mol_type = genomic DNA
aataatctttatcaccactaggg

SEQ ID NO: 1481 - DNA, 23 bp, Homo sapiens
  source 1..23: mol_type = genomic DNA
agggaggagatatcaaaagatgg

SEQ ID NO: 1482 - DNA, 23 bp, Homo sapiens
  source 1..23: mol_type = genomic DNA
ctgaggactagatggcagaatgg

SEQ ID NO: 1483 - DNA, 23 bp, Homo sapiens
  source 1..23: mol_type = genomic DNA
atatgactgaacttaaaggctgg

SEQ ID NO: 1484 - DNA, 23 bp, Homo sapiens
  source 1..23: mol_type = genomic DNA
tgttccttccagaggtgtgtggg

SEQ ID NO: 1485 - DNA, 23 bp, Homo sapiens
  source 1..23: mol_type = genomic DNA
tacacctgcttttagaacagtgg

SEQ ID NO: 1486 - DNA, 23 bp, Homo sapiens
  source 1..23: mol_type = genomic DNA
atataattgagaattagtgcagg

SEQ ID NO: 1487 - DNA, 23 bp, Homo sapiens
  source 1..23: mol_type = genomic DNA
ataaggaccagaaggtgaagtgg

SEQ ID NO: 1488 - DNA, 23 bp, Homo sapiens
  source 1..23: mol_type = genomic DNA
gagtattgtgttactagtagagg

SEQ ID NO: 1489 - DNA, 23 bp, Homo sapiens
  source 1..23: mol_type = genomic DNA
ttttaatatctaattcaacatgg

SEQ ID NO: 1490 - DNA, 23 bp, Homo sapiens
  source 1..23: mol_type = genomic DNA
actaatcttaggaagctggctgg

SEQ ID NO: 1491 - DNA, 23 bp, Homo sapiens
  source 1..23: mol_type = genomic DNA
ggaattttacaccaggtcgaagg

SEQ ID NO: 1492 - DNA, 23 bp, Homo sapiens
  source 1..23: mol_type = genomic DNA
gcctgtcagcgatactacctggg

SEQ ID NO: 1493 - DNA, 23 bp, Homo sapiens
  source 1..23: mol_type = genomic DNA
ataccaggaatctcagtcatggg

SEQ ID NO: 1494 - DNA, 23 bp, Homo sapiens
  source 1..23: mol_type = genomic DNA
tagagggctgataataaccttgg

SEQ ID NO: 1495 - DNA, 23 bp, Homo sapiens
  source 1..23: mol_type = genomic DNA
gcatcttgaatttttaaaggagg

SEQ ID NO: 1496 - DNA, 23 bp, Homo sapiens
  source 1..23: mol_type = genomic DNA
atattgacaagggaatgaaatgg

SEQ ID NO: 1497 - DNA, 23 bp, Homo sapiens
  source 1..23: mol_type = genomic DNA
aattctaagcataaagctgaggg

SEQ ID NO: 1498 - DNA, 23 bp, Homo sapiens
  source 1..23: mol_type = genomic DNA
ccacagatatattcctaggaggg

SEQ ID NO: 1499 - DNA, 23 bp, Homo sapiens
  source 1..23: mol_type = genomic DNA
ttaacgttataatttttacaagg

SEQ ID NO: 1500 - DNA, 23 bp, Homo sapiens
  source 1..23: mol_type = genomic DNA
aaaagcttcggcttcatacgtgg

SEQ ID NO: 1501 - DNA, 23 bp, Homo sapiens
  source 1..23: mol_type = genomic DNA
ggtatgatagttaccctacatgg

SEQ ID NO: 1502 - DNA, 23 bp, Homo sapiens
  source 1..23: mol_type = genomic DNA
agagttactctcccattcgaagg

SEQ ID NO: 1503 - DNA, 23 bp, Homo sapiens
  source 1..23: mol_type = genomic DNA
tttccatctctcattcagatggg

SEQ ID NO: 1504 - DNA, 23 bp, Homo sapiens
  source 1..23: mol_type = genomic DNA
tgaatcctgctttttcaaggtgg

SEQ ID NO: 1505 - DNA, 23 bp, Homo sapiens
  source 1..23: mol_type = genomic DNA
atcagttcctccacaacatgtgg

SEQ ID NO: 1506 - DNA, 23 bp, Homo sapiens
  source 1..23: mol_type = genomic DNA
acaaaaaaaaaaaaaaacaatgg

SEQ ID NO: 1507 - DNA, 23 bp, Homo sapiens
  source 1..23: mol_type = genomic DNA
cggatcatgatgaaagccacagg

SEQ ID NO: 1508 - DNA, 23 bp, Homo sapiens
  source 1..23: mol_type = genomic DNA
tcaaactcagttaatggaggcgg

SEQ ID NO: 1509 - DNA, 23 bp, Homo sapiens
  source 1..23: mol_type = genomic DNA
tttgaagtgatttaatctagagg

SEQ ID NO: 1510 - DNA, 23 bp, Homo sapiens
  source 1..23: mol_type = genomic DNA
ataaaaagcaaagagaacatagg

SEQ ID NO: 1511 - DNA, 23 bp, Homo sapiens
  source 1..23: mol_type = genomic DNA
aattagtctataggataaggtgg

SEQ ID NO: 1512 - DNA, 23 bp, Homo sapiens
  source 1..23: mol_type = genomic DNA
agacagagtctgggtccccatgg

SEQ ID NO: 1513 - DNA, 23 bp, Homo sapiens
  source 1..23: mol_type = genomic DNA
gaaaaccatatacaaagcatagg

SEQ ID NO: 1514 - DNA, 23 bp, Homo sapiens
  source 1..23: mol_type = genomic DNA
cattcaaaaatacatgaacaggg

SEQ ID NO: 1515 - DNA, 23 bp, Homo sapiens
  source 1..23: mol_type = genomic DNA
gataggagaatatagactgtagg

SEQ ID NO: 1516 - DNA, 23 bp, Homo sapiens
  source 1..23: mol_type = genomic DNA
tgaaattgtatgggttttagggg

SEQ ID NO: 1517 - DNA, 23 bp, Homo sapiens
  source 1..23: mol_type = genomic DNA
tatatacataatataagccatgg

SEQ ID NO: 1518 - DNA, 23 bp, Homo sapiens
  source 1..23: mol_type = genomic DNA
aaacagggtttaataggtgaggg

SEQ ID NO: 1519 - DNA, 23 bp, Homo sapiens
  source 1..23: mol_type = genomic DNA
gaataggaaaagaacaactaggg

SEQ ID NO: 1520 - DNA, 23 bp, Homo sapiens
  source 1..23: mol_type = genomic DNA
tgcttttcaaaggtgtgtggagg

SEQ ID NO: 1521 - DNA, 23 bp, Homo sapiens
  source 1..23: mol_type = genomic DNA
ttaataaagtttctacagaaggg

SEQ ID NO: 1522 - DNA, 23 bp, Homo sapiens
  source 1..23: mol_type = genomic DNA
ttactggagaaccatgcagtagg

SEQ ID NO: 1523 - DNA, 23 bp, Homo sapiens
  source 1..23: mol_type = genomic DNA
ctaagataaaatgtgacagtagg

SEQ ID NO: 1524 - DNA, 23 bp, Homo sapiens
  source 1..23: mol_type = genomic DNA
ctcgagaagccgcaaaaccaagg

SEQ ID NO: 1525 - DNA, 23 bp, Homo sapiens
  source 1..23: mol_type = genomic DNA
ctacattggctaaggagccaagg

SEQ ID NO: 1526 - DNA, 23 bp, Homo sapiens
  source 1..23: mol_type = genomic DNA
gaaaacttatacatttaagtggg

SEQ ID NO: 1527 - DNA, 23 bp, Homo sapiens
  source 1..23: mol_type = genomic DNA
aatagaattaatatctgcagagg

SEQ ID NO: 1528 - DNA, 23 bp, Homo sapiens
  source 1..23: mol_type = genomic DNA
aatctattaaatgaagtcctggg

SEQ ID NO: 1529 - DNA, 23 bp, Homo sapiens
  source 1..23: mol_type = genomic DNA
tctatgaatttgctatgcaccgg

SEQ ID NO: 1530 - DNA, 23 bp, Homo sapiens
  source 1..23: mol_type = genomic DNA
ctgaatattctatcaaagcaagg

SEQ ID NO: 1531 - DNA, 23 bp, Homo sapiens
  source 1..23: mol_type = genomic DNA
cccttgatctctgctcaaagagg

SEQ ID NO: 1532 - DNA, 23 bp, Homo sapiens
  source 1..23: mol_type = genomic DNA
ttctggaaaacttagcacgttgg

SEQ ID NO: 1533 - DNA, 23 bp, Homo sapiens
  source 1..23: mol_type = genomic DNA
tgtatttttatgtagcgcgtggg

SEQ ID NO: 1534 - DNA, 23 bp, Homo sapiens
  source 1..23: mol_type = genomic DNA
tgccgtgctacttaagagaaggg

SEQ ID NO: 1535 - DNA, 23 bp, Homo sapiens
  source 1..23: mol_type = genomic DNA
gaaatatgtcaaacaactggagg

SEQ ID NO: 1536 - DNA, 23 bp, Homo sapiens
  source 1..23: mol_type = genomic DNA
ctcacagtgcaagatacaaaggg

SEQ ID NO: 1537 - DNA, 23 bp, Homo sapiens
  source 1..23: mol_type = genomic DNA
tgaggacgtgtgcaacgggatgg

SEQ ID NO: 1538 - DNA, 23 bp, Homo sapiens
  source 1..23: mol_type = genomic DNA
taacacctgctgctatgaagagg

SEQ ID NO: 1539 - DNA, 23 bp, Homo sapiens
  source 1..23: mol_type = genomic DNA
tacacgaaactgatgtccaatgg

SEQ ID NO: 1540 - DNA, 23 bp, Homo sapiens
  source 1..23: mol_type = genomic DNA
ttcttccccacagaccacattgg

SEQ ID NO: 1541 - DNA, 23 bp, Homo sapiens
  source 1..23: mol_type = genomic DNA
atgtaaccatgcttgacgctagg

SEQ ID NO: 1542 - DNA, 23 bp, Homo sapiens
  source 1..23: mol_type = genomic DNA
acttgggctcttagaaagtaggg

SEQ ID NO: 1543 - DNA, 23 bp, Homo sapiens
  source 1..23: mol_type = genomic DNA
agttttcacagagagcaaaaggg

SEQ ID NO: 1544 - DNA, 23 bp, Homo sapiens
  source 1..23: mol_type = genomic DNA
taattgttatcagttgtacaagg

SEQ ID NO: 1545 - DNA, 23 bp, Homo sapiens
  source 1..23: mol_type = genomic DNA
gcctatggaacaatacatgttgg

SEQ ID NO: 1546 - DNA, 23 bp, Homo sapiens
  source 1..23: mol_type = genomic DNA
gcatttccctaaactgaatgagg

SEQ ID NO: 1547 - DNA, 23 bp, Homo sapiens
  source 1..23: mol_type = genomic DNA
tcctgattgtgggaaatcagagg

SEQ ID NO: 1548 - DNA, 23 bp, Homo sapiens
  source 1..23: mol_type = genomic DNA
aaatgaataatcttttgctaggg

SEQ ID NO: 1549 - DNA, 23 bp, Homo sapiens
  source 1..23: mol_type = genomic DNA
tcatcctaggctgttgagaaggg

SEQ ID NO: 1550 - DNA, 23 bp, Homo sapiens
  source 1..23: mol_type = genomic DNA
tttatattaataatcaagagtgg

SEQ ID NO: 1551 - DNA, 23 bp, Homo sapiens
  source 1..23: mol_type = genomic DNA
tactcaagcacctttgtgcaagg

SEQ ID NO: 1552 - DNA, 23 bp, Homo sapiens
  source 1..23: mol_type = genomic DNA
tgttcttgctataaaatgtgtgg

SEQ ID NO: 1553 - DNA, 23 bp, Homo sapiens
  source 1..23: mol_type = genomic DNA
tacttcacttgaacttagcaggg

SEQ ID NO: 1554 - DNA, 23 bp, Homo sapiens
  source 1..23: mol_type = genomic DNA
gtgcaaaatatgtttggcagggg

SEQ ID NO: 1555 - DNA, 23 bp, Homo sapiens
  source 1..23: mol_type = genomic DNA
gtagcataccactatggagatgg

SEQ ID NO: 1556 - DNA, 23 bp, Homo sapiens
  source 1..23: mol_type = genomic DNA
aacttaccacataatccgactgg

SEQ ID NO: 1557 - DNA, 23 bp, Homo sapiens
  source 1..23: mol_type = genomic DNA
cctgattgtgggaaatcagaggg

SEQ ID NO: 1558 - DNA, 23 bp, Homo sapiens
  source 1..23: mol_type = genomic DNA
agtcaatgcttatatgggaaagg

SEQ ID NO: 1559 - DNA, 23 bp, Homo sapiens
  source 1..23: mol_type = genomic DNA
gctttaataagagaaacctctgg

SEQ ID NO: 1560 - DNA, 23 bp, Homo sapiens
  source 1..23: mol_type = genomic DNA
ctctatatctgcaaactcaaggg

SEQ ID NO: 1561 - DNA, 23 bp, Homo sapiens
  source 1..23: mol_type = genomic DNA
atttgtattaagcgaagccatgg

SEQ ID NO: 1562 - DNA, 23 bp, Homo sapiens
  source 1..23: mol_type = genomic DNA
atcttatgacacaccaccctagg

SEQ ID NO: 1563 - DNA, 23 bp, Homo sapiens
  source 1..23: mol_type = genomic DNA
taaggaccagaaggtgaagtggg

SEQ ID NO: 1564 - DNA, 23 bp, Homo sapiens
  source 1..23: mol_type = genomic DNA
gttaatttatttcaggaacatgg

SEQ ID NO: 1565 - DNA, 23 bp, Homo sapiens
  source 1..23: mol_type = genomic DNA
atgaaaacttagccttgccatgg

SEQ ID NO: 1566 - DNA, 23 bp, Homo sapiens
  source 1..23: mol_type = genomic DNA
tgtatgcttacactgtgtgtggg

SEQ ID NO: 1567 - DNA, 23 bp, Homo sapiens
  source 1..23: mol_type = genomic DNA
aaaattgtaccaccagtacaagg

SEQ ID NO: 1568 - DNA, 23 bp, Homo sapiens
  source 1..23: mol_type = genomic DNA
aagtttttaatcaaagaagacgg

SEQ ID NO: 1569 - DNA, 23 bp, Homo sapiens
  source 1..23: mol_type = genomic DNA
tctagcacaacagggtccacagg

SEQ ID NO: 1570 - DNA, 23 bp, Homo sapiens
  source 1..23: mol_type = genomic DNA
ggcaggtcctagtttaccctagg

SEQ ID NO: 1571 - DNA, 23 bp, Homo sapiens
  source 1..23: mol_type = genomic DNA
ccacaagtcaaagatgggtgggg

SEQ ID NO: 1572 - DNA, 23 bp, Homo sapiens
  source 1..23: mol_type = genomic DNA
gatgaacaatccagatatagggg

SEQ ID NO: 1573 - DNA, 23 bp, Homo sapiens
  source 1..23: mol_type = genomic DNA
ctagaatgactctcagcctaggg

SEQ ID NO: 1574 - DNA, 23 bp, Homo sapiens
  source 1..23: mol_type = genomic DNA
acttaactctctgttgtgagggg

SEQ ID NO: 1575 - DNA, 23 bp, Homo sapiens
  source 1..23: mol_type = genomic DNA
agcaaatgacatggagtacaggg

SEQ ID NO: 1576 - DNA, 23 bp, Homo sapiens
  source 1..23: mol_type = genomic DNA
atagctcattagctcaatgaagg

SEQ ID NO: 1577 - DNA, 23 bp, Homo sapiens
  source 1..23: mol_type = genomic DNA
acaaatagctgagagttggtggg

SEQ ID NO: 1578 - DNA, 23 bp, Homo sapiens
  source 1..23: mol_type = genomic DNA
aatgatgtcaaccagtaggatgg

SEQ ID NO: 1579 - DNA, 23 bp, Homo sapiens
  source 1..23: mol_type = genomic DNA
aagaaattagctcttggccaggg

SEQ ID NO: 1580 - DNA, 23 bp, Homo sapiens
  source 1..23: mol_type = genomic DNA
cactgtgttggaaaataagaggg

SEQ ID NO: 1581 - DNA, 23 bp, Homo sapiens
  source 1..23: mol_type = genomic DNA
aaacgaaaggagcttccactagg

SEQ ID NO: 1582 - DNA, 23 bp, Homo sapiens
  source 1..23: mol_type = genomic DNA
ttcttctcctagcatcacacagg

SEQ ID NO: 1583 - DNA, 23 bp, Homo sapiens
  source 1..23: mol_type = genomic DNA
gagctgtcagtcatagtgctggg

SEQ ID NO: 1584 - DNA, 23 bp, Homo sapiens
  source 1..23: mol_type = genomic DNA
catatcttgtaaatatactaggg

SEQ ID NO: 1585 - DNA, 23 bp, Homo sapiens
  source 1..23: mol_type = genomic DNA
cctgaaagcaaaataaaatgtgg

SEQ ID NO: 1586 - DNA, 23 bp, Homo sapiens
  source 1..23: mol_type = genomic DNA
agttgggcaaagactggggtagg

SEQ ID NO: 1587 - DNA, 23 bp, Homo sapiens
  source 1..23: mol_type = genomic DNA
gagaatacaaaagaaatcctggg

SEQ ID NO: 1588 - DNA, 23 bp, Homo sapiens
  source 1..23: mol_type = genomic DNA
catactgaaggatttggggttgg

SEQ ID NO: 1589 - DNA, 23 bp, Homo sapiens
  source 1..23: mol_type = genomic DNA
acaaatacataaatttggcaggg

SEQ ID NO: 1590 - DNA, 23 bp, Homo sapiens
  source 1..23: mol_type = genomic DNA
ttacctggcagcccacctcatgg

SEQ ID NO: 1591 - DNA, 23 bp, Homo sapiens
  source 1..23: mol_type = genomic DNA
atcttcacaagcccttgaagagg

SEQ ID NO: 1592 - DNA, 23 bp, Homo sapiens
  source 1..23: mol_type = genomic DNA
ctgagggattggaagagtcaggg

SEQ ID NO: 1593 - DNA, 23 bp, Homo sapiens
  source 1..23: mol_type = genomic DNA
tttcaaatatcattactccctgg

SEQ ID NO: 1594 - DNA, 23 bp, Homo sapiens
  source 1..23: mol_type = genomic DNA
tgttgtatctctgttcgttgtgg

SEQ ID NO: 1595 - DNA, 23 bp, Homo sapiens
  source 1..23: mol_type = genomic DNA
tcatcactaatagaaaatgatgg

SEQ ID NO: 1596 - DNA, 23 bp, Homo sapiens
  source 1..23: mol_type = genomic DNA
acactacaatcatatatatgtgg

SEQ ID NO: 1597 - DNA, 23 bp, Homo sapiens
  source 1..23: mol_type = genomic DNA
agatccccccattacacttgtgg

SEQ ID NO: 1598 - DNA, 23 bp, Homo sapiens
  source 1..23: mol_type = genomic DNA
agaaagaagtagcaaatgcaagg

SEQ ID NO: 1599 - DNA, 23 bp, Homo sapiens
  source 1..23: mol_type = genomic DNA
ttcaaaataatgagcactagagg

SEQ ID NO: 1600 - DNA, 23 bp, Homo sapiens
  source 1..23: mol_type = genomic DNA
gcagagtactactgaagttgagg

SEQ ID NO: 1601 - DNA, 23 bp, Homo sapiens
  source 1..23: mol_type = genomic DNA
agtataaatcaactgcgcattgg

SEQ ID NO: 1602 - DNA, 23 bp, Homo sapiens
  source 1..23: mol_type = genomic DNA
agattacacatgttgttaagggg

SEQ ID NO: 1603 - DNA, 23 bp, Homo sapiens
  source 1..23: mol_type = genomic DNA
gttcttacttcgtagaatggtgg

SEQ ID NO: 1604 - DNA, 23 bp, Homo sapiens
  source 1..23: mol_type = genomic DNA
ttaatagaactagagaatcaggg

SEQ ID NO: 1605 - DNA, 23 bp, Homo sapiens
  source 1..23: mol_type = genomic DNA
tcagacagtgatgtttcatgtgg

SEQ ID NO: 1606 - DNA, 23 bp, Homo sapiens
  source 1..23: mol_type = genomic DNA
cttcccatctgaatgagagatgg

SEQ ID NO: 1607 - DNA, 23 bp, Homo sapiens
  source 1..23: mol_type = genomic DNA
gggagaaatgagtaaaaatgtgg

SEQ ID NO: 1608 - DNA, 23 bp, Homo sapiens
  source 1..23: mol_type = genomic DNA
aatttctatgaatttcaagtggg

SEQ ID NO: 1609 - DNA, 23 bp, Homo sapiens
  source 1..23: mol_type = genomic DNA
acagggactctcttctagtaggg

SEQ ID NO: 1610 - DNA, 23 bp, Homo sapiens
  source 1..23: mol_type = genomic DNA
gcaaggacatgtaggaaggaagg

SEQ ID NO: 1611 - DNA, 23 bp, Homo sapiens
  source 1..23: mol_type = genomic DNA
acagtgagagttggatagagagg

SEQ ID NO: 1612 - DNA, 23 bp, Homo sapiens
  source 1..23: mol_type = genomic DNA
tcatatgttcactagtactgagg

SEQ ID NO: 1613 - DNA, 23 bp, Homo sapiens
  source 1..23: mol_type = genomic DNA
aaggaataatcatttctccatgg

SEQ ID NO: 1614 - DNA, 23 bp, Homo sapiens
  source 1..23: mol_type = genomic DNA
aggatttgtcaatattccaaggg

SEQ ID NO: 1615 - DNA, 23 bp, Homo sapiens
  source 1..23: mol_type = genomic DNA
acatacttttcagataacattgg

SEQ ID NO: 1616 - DNA, 23 bp, Homo sapiens
  source 1..23: mol_type = genomic DNA
caggaaaaggggttcaagaaggg

SEQ ID NO: 1617 - DNA, 23 bp, Homo sapiens
  source 1..23: mol_type = genomic DNA
ttcagccaaaagtaaagaagagg

SEQ ID NO: 1618 - DNA, 23 bp, Homo sapiens
  source 1..23: mol_type = genomic DNA
ggcacagtaagcctttggatggg

SEQ ID NO: 1619 - DNA, 23 bp, Homo sapiens
  source 1..23: mol_type = genomic DNA
ttttaagtaaaagggacacctgg

SEQ ID NO: 1620 - DNA, 23 bp, Homo sapiens
  source 1..23: mol_type = genomic DNA
ggatttagtgtcagatatggagg

SEQ ID NO: 1621 - DNA, 23 bp, Homo sapiens
  source 1..23: mol_type = genomic DNA
ctatggcaccttcagtgataggg

SEQ ID NO: 1622 - DNA, 23 bp, Homo sapiens
  source 1..23: mol_type = genomic DNA
atcctggcagaaaactatgctgg

SEQ ID NO: 1623 - DNA, 23 bp, Homo sapiens
  source 1..23: mol_type = genomic DNA
tattgtacctcacagcatagagg

SEQ ID NO: 1624 - DNA, 23 bp, Homo sapiens
  source 1..23: mol_type = genomic DNA
ttttccacatcactcacactagg

SEQ ID NO: 1625 - DNA, 23 bp, Homo sapiens
  source 1..23: mol_type = genomic DNA
aggtagaagccactgagagaggg

SEQ ID NO: 1626 - DNA, 23 bp, Homo sapiens
  source 1..23: mol_type = genomic DNA
atcactcgttcaaaatacttggg

SEQ ID NO: 1627 - DNA, 23 bp, Homo sapiens
  source 1..23: mol_type = genomic DNA
aggtagctaagtattaggaaggg

SEQ ID NO: 1628 - DNA, 23 bp, Homo sapiens
  source 1..23: mol_type = genomic DNA
actataacctatggataggatgg

SEQ ID NO: 1629 - DNA, 23 bp, Homo sapiens
  source 1..23: mol_type = genomic DNA
atattggaacttactctgctagg

SEQ ID NO: 1630 - DNA, 23 bp, Homo sapiens
  source 1..23: mol_type = genomic DNA
ggttacaaaggagggctgaaagg

SEQ ID NO: 1631 - DNA, 23 bp, Homo sapiens
  source 1..23: mol_type = genomic DNA
cctagtatcttgataaccccagg

SEQ ID NO: 1632 - DNA, 23 bp, Homo sapiens
  source 1..23: mol_type = genomic DNA
cttttatatgtttagcctagagg

SEQ ID NO: 1633 - DNA, 23 bp, Homo sapiens
  source 1..23: mol_type = genomic DNA
tcatgcatatgattacagaaagg

SEQ ID NO: 1634 - DNA, 23 bp, Homo sapiens
  source 1..23: mol_type = genomic DNA
atagtgcccaaccagagcaaagg

SEQ ID NO: 1635 - DNA, 23 bp, Homo sapiens
  source 1..23: mol_type = genomic DNA
ctgtgacgacgatcattggtggg

SEQ ID NO: 1636 - DNA, 23 bp, Homo sapiens
  source 1..23: mol_type = genomic DNA
aagagaattacgttaagggatgg

SEQ ID NO: 1637 - DNA, 23 bp, Homo sapiens
  source 1..23: mol_type = genomic DNA
aatactgtaggttaagaaagtgg

SEQ ID NO: 1638 - DNA, 23 bp, Homo sapiens
  source 1..23: mol_type = genomic DNA
aaacccacgaagagagaagaggg

SEQ ID NO: 1639 - DNA, 23 bp, Homo sapiens
  source 1..23: mol_type = genomic DNA
tggacaagattgaggaacaaagg

SEQ ID NO: 1640 - DNA, 23 bp, Homo sapiens
  source 1..23: mol_type = genomic DNA
aggatggtatcaggttagcttgg

SEQ ID NO: 1641 - DNA, 23 bp, Homo sapiens
  source 1..23: mol_type = genomic DNA
tcatatttaacaaatctaagtgg

SEQ ID NO: 1642 - DNA, 23 bp, Homo sapiens
  source 1..23: mol_type = genomic DNA
taacatgaaaaaattggtagggg

SEQ ID NO: 1643 - DNA, 23 bp, Homo sapiens
  source 1..23: mol_type = genomic DNA
ttgttattagccacaaatcaggg

SEQ ID NO: 1644 - DNA, 23 bp, Homo sapiens
  source 1..23: mol_type = genomic DNA
tagaacaaagtggcaggcatggg

SEQ ID NO: 1645 - DNA, 23 bp, Homo sapiens
  source 1..23: mol_type = genomic DNA
agaccaccctaaaaatcaccagg

SEQ ID NO: 1646 - DNA, 23 bp, Homo sapiens
  source 1..23: mol_type = genomic DNA
ccttaaaatgttaagtactgagg

SEQ ID NO: 1647 - DNA, 23 bp, Homo sapiens
  source 1..23: mol_type = genomic DNA
gatcagtcagagtccaggcttgg

SEQ ID NO: 1648 - DNA, 23 bp, Homo sapiens
  source 1..23: mol_type = genomic DNA
gcacatgtaggaaatataagtgg

SEQ ID NO: 1649 - DNA, 23 bp, Homo sapiens
  source 1..23: mol_type = genomic DNA
tagtatcataatctttaccatgg

SEQ ID NO: 1650 - DNA, 23 bp, Homo sapiens
  source 1..23: mol_type = genomic DNA
ttatctgtatacaaattcaccgg

SEQ ID NO: 1651 - DNA, 23 bp, Homo sapiens
  source 1..23: mol_type = genomic DNA
tttctatcacagatttacatggg

SEQ ID NO: 1652 - DNA, 23 bp, Homo sapiens
  source 1..23: mol_type = genomic DNA
aagcactgagaattagggatagg

SEQ ID NO: 1653 - DNA, 23 bp, Homo sapiens
  source 1..23: mol_type = genomic DNA
atccagactactaagaacattgg

SEQ ID NO: 1654 - DNA, 23 bp, Homo sapiens
  source 1..23: mol_type = genomic DNA
agtattgacagtctgaccatggg

SEQ ID NO: 1655 - DNA, 23 bp, Homo sapiens
  source 1..23: mol_type = genomic DNA
tgagcaaacgtttatagaggagg

SEQ ID NO: 1656 - DNA, 23 bp, Homo sapiens
  source 1..23: mol_type = genomic DNA
caagggcatcaagtaagaagagg

SEQ ID NO: 1657 - DNA, 23 bp, Homo sapiens
  source 1..23: mol_type = genomic DNA
gaaagaaacttaactagcagtgg

SEQ ID NO: 1658 - DNA, 23 bp, Homo sapiens
  source 1..23: mol_type = genomic DNA
agatgtatttttaagctaggagg

SEQ ID NO: 1659 - DNA, 23 bp, Homo sapiens
  source 1..23: mol_type = genomic DNA
ggatgagtaacttttgaaggagg

SEQ ID NO: 1660 - DNA, 23 bp, Homo sapiens
  source 1..23: mol_type = genomic DNA
actccgttacacgtttacaaagg

SEQ ID NO: 1661 - DNA, 23 bp, Homo sapiens
  source 1..23: mol_type = genomic DNA
ggttaaacggaagcaaaagtagg

SEQ ID NO: 1662 - DNA, 23 bp, Homo sapiens
  source 1..23: mol_type = genomic DNA
ttattgttctagcagcaagaagg

SEQ ID NO: 1663 - DNA, 23 bp, Homo sapiens
  source 1..23: mol_type = genomic DNA
tctgttttgaaaaatagtcaagg

SEQ ID NO: 1664 - DNA, 23 bp, Homo sapiens
  source 1..23: mol_type = genomic DNA
ttacaatatattgagtacactgg

SEQ ID NO: 1665 - DNA, 23 bp, Homo sapiens
  source 1..23: mol_type = genomic DNA
acacctgtcatctcaaaagaagg

SEQ ID NO: 1666 - DNA, 23 bp, Homo sapiens
  source 1..23: mol_type = genomic DNA
gctcatttaggtagtttgagtgg

SEQ ID NO: 1667 - DNA, 23 bp, Homo sapiens
  source 1..23: mol_type = genomic DNA
ttgaactcctaattagaggatgg

SEQ ID NO: 1668 - DNA, 23 bp, Homo sapiens
  source 1..23: mol_type = genomic DNA
ccatattcttaagacaacttggg

SEQ ID NO: 1669 - DNA, 23 bp, Homo sapiens
  source 1..23: mol_type = genomic DNA
ccacatccactgataggcaatgg

SEQ ID NO: 1670 - DNA, 23 bp, Homo sapiens
  source 1..23: mol_type = genomic DNA
aacagactcttaagcagcagtgg

SEQ ID NO: 1671 - DNA, 23 bp, Homo sapiens
  source 1..23: mol_type = genomic DNA
tgaaacatataagttatgacagg

SEQ ID NO: 1672 - DNA, 23 bp, Homo sapiens
  source 1..23: mol_type = genomic DNA
agtgtaatctagcacagcaatgg

SEQ ID NO: 1673 - DNA, 23 bp, Homo sapiens
  source 1..23: mol_type = genomic DNA
cttttcatgactctatctggtgg

SEQ ID NO: 1674 - DNA, 23 bp, Homo sapiens
  source 1..23: mol_type = genomic DNA
gtgactagaaaatctgaactagg

SEQ ID NO: 1675 - DNA, 23 bp, Homo sapiens
  source 1..23: mol_type = genomic DNA
agagaataaaaggcccagaatgg

SEQ ID NO: 1676 - DNA, 23 bp, Homo sapiens
  source 1..23: mol_type = genomic DNA
acagtgcctaaagtcgaaaaggg

SEQ ID NO: 1677 - DNA, 23 bp, Homo sapiens
  source 1..23: mol_type = genomic DNA
aatgcgaagccactacccatggg

SEQ ID NO: 1678 - DNA, 23 bp, Homo sapiens
  source 1..23: mol_type = genomic DNA
tcaccagggctgagaataggagg

SEQ ID NO: 1679 - DNA, 23 bp, Homo sapiens
  source 1..23: mol_type = genomic DNA
ttacatttctaaataaatgtggg

SEQ ID NO: 1680 - DNA, 23 bp, Homo sapiens
  source 1..23: mol_type = genomic DNA
atgaaatactttaacacccaggg

SEQ ID NO: 1681 - DNA, 23 bp, Homo sapiens
  source 1..23: mol_type = genomic DNA
atataccgcctatagttgatggg

SEQ ID NO: 1682 - DNA, 23 bp, Homo sapiens
  source 1..23: mol_type = genomic DNA
agatagctaggctaattccaagg

SEQ ID NO: 1683 - DNA, 23 bp, Homo sapiens
  source 1..23: mol_type = genomic DNA
cattagctgctttctagctgagg

SEQ ID NO: 1684 - DNA, 23 bp, Homo sapiens
  source 1..23: mol_type = genomic DNA
caacacatacaataaatgtaggg

SEQ ID NO: 1685 - DNA, 23 bp, Homo sapiens
  source 1..23: mol_type = genomic DNA
tcaaactttattgctccagtagg

SEQ ID NO: 1686 - DNA, 23 bp, Homo sapiens
  source 1..23: mol_type = genomic DNA
attagttcctttactcaacaagg

SEQ ID NO: 1687 - DNA, 23 bp, Homo sapiens
  source 1..23: mol_type = genomic DNA
atataacacagaaagtaaaaggg

SEQ ID NO: 1688 - DNA, 23 bp, Homo sapiens
  source 1..23: mol_type = genomic DNA
gtgagtaactagaaatgcatggg

SEQ ID NO: 1689 - DNA, 23 bp, Homo sapiens
  source 1..23: mol_type = genomic DNA
ttcactgtatctatgcagaaagg

SEQ ID NO: 1690 - DNA, 23 bp, Homo sapiens
  source 1..23: mol_type = genomic DNA
aattaaactccaatatattgagg

SEQ ID NO: 1691 - DNA, 23 bp, Homo sapiens
  source 1..23: mol_type = genomic DNA
cataatcactgagcttctcaggg

SEQ ID NO: 1692 - DNA, 23 bp, Homo sapiens
  source 1..23: mol_type = genomic DNA
agatgaatgtgatttaaatgggg

SEQ ID NO: 1693 - DNA, 23 bp, Homo sapiens
  source 1..23: mol_type = genomic DNA
gttacattttctatgactagagg

SEQ ID NO: 1694 - DNA, 23 bp, Homo sapiens
  source 1..23: mol_type = genomic DNA
agaatgaaaatctatctggttgg

SEQ ID NO: 1695 - DNA, 23 bp, Homo sapiens
  source 1..23: mol_type = genomic DNA
ggcttaatagaagatcagttggg

SEQ ID NO: 1696 - DNA, 23 bp, Homo sapiens
  source 1..23: mol_type = genomic DNA
gattacaccttgtactgggatgg

SEQ ID NO: 1697 - DNA, 23 bp, Homo sapiens
  source 1..23: mol_type = genomic DNA
attgtgttcaaaatttacactgg

SEQ ID NO: 1698 - DNA, 23 bp, Homo sapiens
  source 1..23: mol_type = genomic DNA
ccaaccagcaaaataaccctagg

SEQ ID NO: 1699 - DNA, 23 bp, Homo sapiens
  source 1..23: mol_type = genomic DNA
tttatagtaggcagtgcatacgg

SEQ ID NO: 1700 - DNA, 23 bp, Homo sapiens
  source 1..23: mol_type = genomic DNA
gaacaggcgggtcccatgggtgg

SEQ ID NO: 1701 - DNA, 23 bp, Homo sapiens
  source 1..23: mol_type = genomic DNA
atcgactcttggaatggcagcgg

SEQ ID NO: 1702 - DNA, 23 bp, Homo sapiens
  source 1..23: mol_type = genomic DNA
tggttccagtgagatacagcagg

SEQ ID NO: 1703 - DNA, 23 bp, Homo sapiens
  source 1..23: mol_type = genomic DNA
ggaagaagatctttgcatgcagg

SEQ ID NO: 1704 - DNA, 23 bp, Homo sapiens
  source 1..23: mol_type = genomic DNA
tactggagaaccatgcagtaggg

SEQ ID NO: 1705 - DNA, 23 bp, Homo sapiens
  source 1..23: mol_type = genomic DNA
gccttgtagttatcccacatggg

SEQ ID NO: 1706 - DNA, 23 bp, Homo sapiens
  source 1..23: mol_type = genomic DNA
atatgtgctcaagtgagtacagg

SEQ ID NO: 1707 - DNA, 23 bp, Homo sapiens
  source 1..23: mol_type = genomic DNA
tttgatggaagtatgagtaaggg

SEQ ID NO: 1708 - DNA, 23 bp, Homo sapiens
  source 1..23: mol_type = genomic DNA
acaataactggaaaagtgaaagg

SEQ ID NO: 1709 - DNA, 23 bp, Homo sapiens
  source 1..23: mol_type = genomic DNA
gtgttttaagaagatatatgtgg

SEQ ID NO: 1710 - DNA, 23 bp, Homo sapiens
  source 1..23: mol_type = genomic DNA
tataattgagaattagtgcaggg

SEQ ID NO: 1711 - DNA, 23 bp, Homo sapiens
  source 1..23: mol_type = genomic DNA
gaaattgctaatacaatggacgg

SEQ ID NO: 1712 - DNA, 23 bp, Homo sapiens
  source 1..23: mol_type = genomic DNA
caaggataggactttatccatgg

SEQ ID NO: 1713 - DNA, 23 bp, Homo sapiens
  source 1..23: mol_type = genomic DNA
gggtataaagtttcctaagaggg

SEQ ID NO: 1714 - DNA, 23 bp, Homo sapiens
  source 1..23: mol_type = genomic DNA
ttatgagtcagtttgaaatgagg

SEQ ID NO: 1715 - DNA, 23 bp, Homo sapiens
  source 1..23: mol_type = genomic DNA
tgaaaaaaataaggaccagaagg

SEQ ID NO: 1716 - DNA, 23 bp, Homo sapiens
  source 1..23: mol_type = genomic DNA
tgagaaaagcttaaagctaacgg

SEQ ID NO: 1717 - DNA, 23 bp, Homo sapiens
  source 1..23: mol_type = genomic DNA
gagggcaaaagaactgtagacgg

SEQ ID NO: 1718 - DNA, 23 bp, Homo sapiens
  source 1..23: mol_type = genomic DNA
gcttttgatgtattctaatgggg

SEQ ID NO: 1719 - DNA, 23 bp, Homo sapiens
  source 1..23: mol_type = genomic DNA
atatgaggaaatagatcaccagg

SEQ ID NO: 1720 - DNA, 23 bp, Homo sapiens
  source 1..23: mol_type = genomic DNA
acataacagactcctttcacagg

SEQ ID NO: 1721 - DNA, 23 bp, Homo sapiens
  source 1..23: mol_type = genomic DNA
acagactattttccccccatggg

SEQ ID NO: 1722 - DNA, 23 bp, Homo sapiens
  source 1..23: mol_type = genomic DNA
ccaggcaaagaaagaagagatgg

SEQ ID NO: 1723 - DNA, 23 bp, Homo sapiens
  source 1..23: mol_type = genomic DNA
ttaagactcattcaggactcagg

SEQ ID NO: 1724 - DNA, 23 bp, Homo sapiens
  source 1..23: mol_type = genomic DNA
ttttccaaacgtttataacaagg

SEQ ID NO: 1725 - DNA, 23 bp, Homo sapiens
  source 1..23: mol_type = genomic DNA
gtagagctgtgtgaatccatggg

SEQ ID NO: 1726 - DNA, 23 bp, Homo sapiens
  source 1..23: mol_type = genomic DNA
gtaaacatcatcaaggcagatgg

SEQ ID NO: 1727 - DNA, 23 bp, Homo sapiens
  source 1..23: mol_type = genomic DNA
gtagttaaggtactaaagtaggg

SEQ ID NO: 1728 - DNA, 23 bp, Homo sapiens
  source 1..23: mol_type = genomic DNA
gcaggaagttgggaggctggtgg

SEQ ID NO: 1729 - DNA, 23 bp, Homo sapiens
  source 1..23: mol_type = genomic DNA
gagttactctcccattcgaaggg

SEQ ID NO: 1730 - DNA, 23 bp, Homo sapiens
  source 1..23: mol_type = genomic DNA
aaaggaatccccacaaattgggg

SEQ ID NO: 1731 - DNA, 23 bp, Homo sapiens
  source 1..23: mol_type = genomic DNA
aaaaatcatatacatagaagtgg

SEQ ID NO: 1732 - DNA, 23 bp, Homo sapiens
  source 1..23: mol_type = genomic DNA
tctattcattcaggctaaggggg

SEQ ID NO: 1733 - DNA, 23 bp, Homo sapiens
  source 1..23: mol_type = genomic DNA
acaagcgctagaagttatgctgg

SEQ ID NO: 1734 - DNA, 23 bp, Homo sapiens
  source 1..23: mol_type = genomic DNA
atgatctcagagtactacattgg

SEQ ID NO: 1735 - DNA, 23 bp, Homo sapiens
  source 1..23: mol_type = genomic DNA
tactggtagcagaaagaatgagg

SEQ ID NO: 1736 - DNA, 23 bp, Homo sapiens
  source 1..23: mol_type = genomic DNA
tcaccgtgattactaatggatgg

SEQ ID NO: 1737 - DNA, 23 bp, Homo sapiens
  source 1..23: mol_type = genomic DNA
ttttaaacgtccttttgtagagg

SEQ ID NO: 1738 - DNA, 23 bp, Homo sapiens
  source 1..23: mol_type = genomic DNA
aaggcctagtgaggaaagatggg

SEQ ID NO: 1739 - DNA, 23 bp, Homo sapiens
  source 1..23: mol_type = genomic DNA
actggttgacatcattacgttgg

SEQ ID NO: 1740 - DNA, 23 bp, Homo sapiens
  source 1..23: mol_type = genomic DNA
gtacacgttgtctttatgaaagg

SEQ ID NO: 1741 - DNA, 23 bp, Homo sapiens
  source 1..23: mol_type = genomic DNA
catctgatgccttagcaaagagg

SEQ ID NO: 1742 - DNA, 23 bp, Homo sapiens
  source 1..23: mol_type = genomic DNA
gcacgaatgtcagtgtcgtatgg

SEQ ID NO: 1743 - DNA, 23 bp, Homo sapiens
  source 1..23: mol_type = genomic DNA
tgcattttattaaattagagtgg

SEQ ID NO: 1744 - DNA, 23 bp, Homo sapiens
  source 1..23: mol_type = genomic DNA
acaataagtaagcttgtgaaggg

SEQ ID NO: 1745 - DNA, 23 bp, Homo sapiens
  source 1..23: mol_type = genomic DNA
tggggtacgatacagtgtaaagg

SEQ ID NO: 1746 - DNA, 23 bp, Homo sapiens
  source 1..23: mol_type = genomic DNA
ctccttcgttatgaatctggagg

SEQ ID NO: 1747 - DNA, 23 bp, Homo sapiens
  source 1..23: mol_type = genomic DNA
attattttaccaagtttggaggg

SEQ ID NO: 1748 - DNA, 23 bp, Homo sapiens
  source 1..23: mol_type = genomic DNA
aagttgaaatacgttcactaagg

SEQ ID NO: 1749 - DNA, 23 bp, Homo sapiens
  source 1..23: mol_type = genomic DNA
gtatttcgtaagaggatgctggg

SEQ ID NO: 1750 - DNA, 23 bp, Homo sapiens
  source 1..23: mol_type = genomic DNA
cacacgtttttaatttaatgcgg

SEQ ID NO: 1751 - DNA, 23 bp, Homo sapiens
  source 1..23: mol_type = genomic DNA
accagaaaagagttaaagcatgg

SEQ ID NO: 1752 - DNA, 23 bp, Homo sapiens
  source 1..23: mol_type = genomic DNA
tggagatgaagccctacactagg

SEQ ID NO: 1753 - DNA, 23 bp, Homo sapiens
  source 1..23: mol_type = genomic DNA
gacgacacagttatttctagagg

SEQ ID NO: 1754 - DNA, 23 bp, Homo sapiens
  source 1..23: mol_type = genomic DNA
ggagagcctacatgtagcctagg

SEQ ID NO: 1755 - DNA, 23 bp, Homo sapiens
  source 1..23: mol_type = genomic DNA
aatcacatttgatgttgtaaggg

SEQ ID NO: 1756 - DNA, 23 bp, Homo sapiens
  source 1..23: mol_type = genomic DNA
taattaccttccccatccaaagg

SEQ ID NO: 1757 - DNA, 23 bp, Homo sapiens
  source 1..23: mol_type = genomic DNA
ttatccctaagacctatgtatgg

SEQ ID NO: 1758 - DNA, 23 bp, Homo sapiens
  source 1..23: mol_type = genomic DNA
cacttaagatgttagagggaggg

SEQ ID NO: 1759 - DNA, 23 bp, Homo sapiens
  source 1..23: mol_type = genomic DNA
gcatcttctgtgactatgcaggg

SEQ ID NO: 1760 - DNA, 23 bp, Homo sapiens
  source 1..23: mol_type = genomic DNA
tgataaaaattattgaaaagggg

SEQ ID NO: 1761 - DNA, 23 bp, Homo sapiens
  source 1..23: mol_type = genomic DNA
tgttccttagtattgagggaagg

SEQ ID NO: 1762 - DNA, 23 bp, Homo sapiens
  source 1..23: mol_type = genomic DNA
ccatacctaacctccattggcgg

SEQ ID NO: 1763 - DNA, 23 bp, Homo sapiens
  source 1..23: mol_type = genomic DNA
tgtgtgggtttttatgcctgtgg

SEQ ID NO: 1764 - DNA, 23 bp, Homo sapiens
  source 1..23: mol_type = genomic DNA
ctgacaacacagaacgaaccagg

SEQ ID NO: 1765 - DNA, 23 bp, Homo sapiens
  source 1..23: mol_type = genomic DNA
tgtgtgtttcagagttgggatgg

SEQ ID NO: 1766 - DNA, 23 bp, Homo sapiens
  source 1..23: mol_type = genomic DNA
atacgtgcatgctttaaggaagg

SEQ ID NO: 1767 - DNA, 23 bp, Homo sapiens
  source 1..23: mol_type = genomic DNA
ggctgactggaccaagattgagg

SEQ ID NO: 1768 - DNA, 23 bp, Homo sapiens
  source 1..23: mol_type = genomic DNA
tattataaaagcaggtcagaggg

SEQ ID NO: 1769 - DNA, 23 bp, Homo sapiens
  source 1..23: mol_type = genomic DNA
tcctacagacaattttgccaagg

SEQ ID NO: 1770 - DNA, 23 bp, Homo sapiens
  source 1..23: mol_type = genomic DNA
tatatttgaggaaataatgaggg

SEQ ID NO: 1771 - DNA, 23 bp, Homo sapiens
  source 1..23: mol_type = genomic DNA
ggctgacacaatcataagcatgg

SEQ ID NO: 1772 - DNA, 23 bp, Homo sapiens
  source 1..23: mol_type = genomic DNA
tttcatctagactgaactcatgg

SEQ ID NO: 1773 - DNA, 23 bp, Homo sapiens
  source 1..23: mol_type = genomic DNA
cctagtagattgtaaggccaagg

SEQ ID NO: 1774 - DNA, 23 bp, Homo sapiens
  source 1..23: mol_type = genomic DNA
agtattttgcatgaagccaaagg

SEQ ID NO: 1775 - DNA, 23 bp, Homo sapiens
  source 1..23: mol_type = genomic DNA
tgtgagtaactagaaatgcatgg

SEQ ID NO: 1776 - DNA, 23 bp, Homo sapiens
  source 1..23: mol_type = genomic DNA
gttagatacaatgcaggccgggg

SEQ ID NO: 1777 - DNA, 23 bp, Homo sapiens
  source 1..23: mol_type = genomic DNA
attagcagtagatgtatctaggg

SEQ ID NO: 1778 - DNA, 23 bp, Homo sapiens
  source 1..23: mol_type = genomic DNA
ctagtgtatgagattagatgagg

SEQ ID NO: 1779 - DNA, 23 bp, Homo sapiens
  source 1..23: mol_type = genomic DNA
cttttcttttaatatacccaagg

SEQ ID NO: 1780 - DNA, 23 bp, Homo sapiens
  source 1..23: mol_type = genomic DNA
atattaaagattgaagtcaatgg

SEQ ID NO: 1781 - DNA, 23 bp, Homo sapiens
  source 1..23: mol_type = genomic DNA
atgccttagcaaagaggagtagg

SEQ ID NO: 1782 - DNA, 23 bp, Homo sapiens
  source 1..23: mol_type = genomic DNA
gtatgtgcattagagagctatgg

SEQ ID NO: 1783 - DNA, 23 bp, Homo sapiens
  source 1..23: mol_type = genomic DNA
tcctttaagtaagacagccaggg

SEQ ID NO: 1784 - DNA, 23 bp, Homo sapiens
  source 1..23: mol_type = genomic DNA
gctagagaaggtcagaagaaggg

SEQ ID NO: 1785 - DNA, 23 bp, Homo sapiens
  source 1..23: mol_type = genomic DNA
atgaagccttccaatttacctgg

SEQ ID NO: 1786 - DNA, 23 bp, Homo sapiens
  source 1..23: mol_type = genomic DNA
gcataaaatctaccagtaggtgg

SEQ ID NO: 1787 - DNA, 23 bp, Homo sapiens
  source 1..23: mol_type = genomic DNA
aagatctaggtcgaatgtgaggg

SEQ ID NO: 1788 - DNA, 23 bp, Homo sapiens
  source 1..23: mol_type = genomic DNA
gatataaccacaatcagaagtgg

SEQ ID NO: 1789 - DNA, 23 bp, Homo sapiens
  source 1..23: mol_type = genomic DNA
ggaaacaacttgaaagaggaagg

SEQ ID NO: 1790 - DNA, 23 bp, Homo sapiens
  source 1..23: mol_type = genomic DNA
aatggaagaatttatctggtagg

SEQ ID NO: 1791 - DNA, 23 bp, Homo sapiens
  source 1..23: mol_type = genomic DNA
ttacttcgtagaatggtggttgg

SEQ ID NO: 1792 - DNA, 23 bp, Homo sapiens
  source 1..23: mol_type = genomic DNA
tacttcatttttctcccgagagg

SEQ ID NO: 1793 - DNA, 23 bp, Homo sapiens
  source 1..23: mol_type = genomic DNA
catcgttatgtgaatgccatggg

SEQ ID NO: 1794 - DNA, 23 bp, Homo sapiens
  source 1..23: mol_type = genomic DNA
tattacaatgtaattagccatgg

SEQ ID NO: 1795 - DNA, 23 bp, Homo sapiens
  source 1..23: mol_type = genomic DNA
tttctttttcctgattccaaggg

SEQ ID NO: 1796 - DNA, 23 bp, Homo sapiens
  source 1..23: mol_type = genomic DNA
tctctttttaatttcctaggagg

SEQ ID NO: 1797 - DNA, 23 bp, Homo sapiens
  source 1..23: mol_type = genomic DNA
ctataatttaataaatccaaggg

SEQ ID NO: 1798 - DNA, 23 bp, Homo sapiens
  source 1..23: mol_type = genomic DNA
agggagcttgaaattttgcaagg

SEQ ID NO: 1799 - DNA, 23 bp, Homo sapiens
  source 1..23: mol_type = genomic DNA
tgaatgggtcagcagccaaaggg

SEQ ID NO: 1800 - DNA, 23 bp, Homo sapiens
  source 1..23: mol_type = genomic DNA
agatttagattaactggggtagg

SEQ ID NO: 1801 - DNA, 23 bp, Homo sapiens
  source 1..23: mol_type = genomic DNA
tgaataccaagaggatggaaagg

SEQ ID NO: 1802 - DNA, 23 bp, Homo sapiens
  source 1..23: mol_type = genomic DNA
atctaaatctgcaaaacgaaagg

SEQ ID NO: 1803 - DNA, 23 bp, Homo sapiens
  source 1..23: mol_type = genomic DNA
gaaaacactcaattggggagagg

SEQ ID NO: 1804 - DNA, 23 bp, Homo sapiens
  source 1..23: mol_type = genomic DNA
aagcaaatggagcatgagcatgg

SEQ ID NO: 1805 - DNA, 23 bp, Homo sapiens
  source 1..23: mol_type = genomic DNA
aatttgcccttatgaaaggaagg

SEQ ID NO: 1806 - DNA, 23 bp, Homo sapiens
  source 1..23: mol_type = genomic DNA
gatttataaaaggcaaacatggg

SEQ ID NO: 1807 - DNA, 23 bp, Homo sapiens
  source 1..23: mol_type = genomic DNA
attaagcactatgtctgcatagg

SEQ ID NO: 1808 - DNA, 23 bp, Homo sapiens
  source 1..23: mol_type = genomic DNA
ttagtttaaaacaatactgaagg

SEQ ID NO: 1809 - DNA, 23 bp, Homo sapiens
  source 1..23: mol_type = genomic DNA
attaaaaagaactttcccacagg

SEQ ID NO: 1810 - DNA, 23 bp, Homo sapiens
  source 1..23: mol_type = genomic DNA
tagtttcagttttcaaactgtgg

SEQ ID NO: 1811 - DNA, 23 bp, Homo sapiens
  source 1..23: mol_type = genomic DNA
ctctctcatggacagtcagaggg

SEQ ID NO: 1812 - DNA, 23 bp, Homo sapiens
  source 1..23: mol_type = genomic DNA
agagcttcttattgagaaagggg

SEQ ID NO: 1813 - DNA, 23 bp, Homo sapiens
  source 1..23: mol_type = genomic DNA
tatgctcaccctttacagaaagg

SEQ ID NO: 1814 - DNA, 23 bp, Homo sapiens
  source 1..23: mol_type = genomic DNA
agtatttcctttgttgacaaggg

SEQ ID NO: 1815 - DNA, 23 bp, Homo sapiens
  source 1..23: mol_type = genomic DNA
ctccgtgcagattctaaggaagg

SEQ ID NO: 1816 - DNA, 23 bp, Homo sapiens
  source 1..23: mol_type = genomic DNA
gaaaccagcagggacctgaatgg

SEQ ID NO: 1817 - DNA, 23 bp, Homo sapiens
  source 1..23: mol_type = genomic DNA
gctttctgaactgattggaaagg

SEQ ID NO: 1818 - DNA, 23 bp, Homo sapiens
  source 1..23: mol_type = genomic DNA
agtatcccttgatacctgaatgg

SEQ ID NO: 1819 - DNA, 23 bp, Homo sapiens
  source 1..23: mol_type = genomic DNA
ggatgggaaaacaatcagaatgg

SEQ ID NO: 1820 - DNA, 23 bp, Homo sapiens
  source 1..23: mol_type = genomic DNA
atgaaatgtttctcagctaaggg

SEQ ID NO: 1821 - DNA, 23 bp, Homo sapiens
  source 1..23: mol_type = genomic DNA
gatgttggagcaatagccacagg

SEQ ID NO: 1822 - DNA, 23 bp, Homo sapiens
  source 1..23: mol_type = genomic DNA
gggataatcactttcactaacgg

SEQ ID NO: 1823 - DNA, 23 bp, Homo sapiens
  source 1..23: mol_type = genomic DNA
acagactcttaagcagcagtggg

SEQ ID NO: 1824 - DNA, 23 bp, Homo sapiens
  source 1..23: mol_type = genomic DNA
atatctgagcaacagatgctagg

SEQ ID NO: 1825 - DNA, 23 bp, Homo sapiens
  source 1..23: mol_type = genomic DNA
tatctcaagagcaaacacttagg

SEQ ID NO: 1826 - DNA, 23 bp, Homo sapiens
  source 1..23: mol_type = genomic DNA
ttgcatcagtttctaaacgaggg

SEQ ID NO: 1827 - DNA, 23 bp, Homo sapiens
  source 1..23: mol_type = genomic DNA
tagtttatattacttgagggtgg

SEQ ID NO: 1828 - DNA, 23 bp, Homo sapiens
  source 1..23: mol_type = genomic DNA
tattcactgccaataacttgggg

SEQ ID NO: 1829 - DNA, 23 bp, Homo sapiens
  source 1..23: mol_type = genomic DNA
gatgaaaaacaactgcagaaagg

SEQ ID NO: 1830 - DNA, 23 bp, Homo sapiens
  source 1..23: mol_type = genomic DNA
caaaagttcatagaaaaaagagg

SEQ ID NO: 1831 - DNA, 23 bp, Homo sapiens
  source 1..23: mol_type = genomic DNA
caacccacttgcatagtgtaggg

SEQ ID NO: 1832 - DNA, 23 bp, Homo sapiens
  source 1..23: mol_type = genomic DNA
tctaagtgacaaaattctgatgg

SEQ ID NO: 1833 - DNA, 23 bp, Homo sapiens
  source 1..23: mol_type = genomic DNA
ttgtcttctatggcaaaccatgg

SEQ ID NO: 1834 - DNA, 23 bp, Homo sapiens
  source 1..23: mol_type = genomic DNA
gatagatttacagaaagagaagg

SEQ ID NO: 1835 - DNA, 23 bp, Homo sapiens
  source 1..23: mol_type = genomic DNA
aagtatagtttctcaataggagg

SEQ ID NO: 1836 - DNA, 23 bp, Homo sapiens
  source 1..23: mol_type = genomic DNA
catattcattatgaatgctgagg

SEQ ID NO: 1837 - DNA, 23 bp, Homo sapiens
  source 1..23: mol_type = genomic DNA
atattgagatacttgccataagg

SEQ ID NO: 1838 - DNA, 23 bp, Homo sapiens
  source 1..23: mol_type = genomic DNA
tgacagcagtcagttcattgagg

SEQ ID NO: 1839 - DNA, 23 bp, Homo sapiens
  source 1..23: mol_type = genomic DNA
ttgaagagataaaaacaagcggg

SEQ ID NO: 1840 - DNA, 23 bp, Homo sapiens
  source 1..23: mol_type = genomic DNA
tgctgtcaatgtacacctgaagg

SEQ ID NO: 1841 - DNA, 23 bp, Homo sapiens
  source 1..23: mol_type = genomic DNA
gagagagaagacttgcaaaaggg

SEQ ID NO: 1842 - DNA, 23 bp, Homo sapiens
  source 1..23: mol_type = genomic DNA
ttaactaacagactaatggaagg

SEQ ID NO: 1843 - DNA, 23 bp, Homo sapiens
  source 1..23: mol_type = genomic DNA
agcataatttaataaatagacgg

SEQ ID NO: 1844 - DNA, 23 bp, Homo sapiens
  source 1..23: mol_type = genomic DNA
tgggtaataggaatatgggatgg

SEQ ID NO: 1845 - DNA, 23 bp, Homo sapiens
  source 1..23: mol_type = genomic DNA
agtggggcaaaaaatgaggtagg

SEQ ID NO: 1846 - DNA, 23 bp, Homo sapiens
  source 1..23: mol_type = genomic DNA
gtatggtactgggattgtagtgg

SEQ ID NO: 1847 - DNA, 23 bp, Homo sapiens
  source 1..23: mol_type = genomic DNA
tttataaccctgatattccaagg

SEQ ID NO: 1848 - DNA, 23 bp, Homo sapiens
  source 1..23: mol_type = genomic DNA
acagttcctaaggccttacctgg

SEQ ID NO: 1849 - DNA, 23 bp, Homo sapiens
  source 1..23: mol_type = genomic DNA
ttttgattggattcagagagagg

SEQ ID NO: 1850 - DNA, 23 bp, Homo sapiens
  source 1..23: mol_type = genomic DNA
ctactccactcgcatcatccagg

SEQ ID NO: 1851 - DNA, 23 bp, Homo sapiens
  source 1..23: mol_type = genomic DNA
ttcatatttcaatatccccatgg

SEQ ID NO: 1852 - DNA, 23 bp, Homo sapiens
  source 1..23: mol_type = genomic DNA
ggaagaacttgagccaacttggg

SEQ ID NO: 1853 - DNA, 23 bp, Homo sapiens
  source 1..23: mol_type = genomic DNA
ttgatatgctaaataaaaggggg

SEQ ID NO: 1854 - DNA, 23 bp, Homo sapiens
  source 1..23: mol_type = genomic DNA
acatgtgtcggtgcttgagaagg

SEQ ID NO: 1855 - DNA, 23 bp, Homo sapiens
  source 1..23: mol_type = genomic DNA
cagagatcctacaagaatcccgg

SEQ ID NO: 1856 - DNA, 23 bp, Homo sapiens
  source 1..23: mol_type = genomic DNA
ctagaagttatgctggtccacgg

SEQ ID NO: 1857 - DNA, 23 bp, Homo sapiens
  source 1..23: mol_type = genomic DNA
cattcgtgtgtgctgtgttgtgg

SEQ ID NO: 1858 - DNA, 23 bp, Homo sapiens
  source 1..23: mol_type = genomic DNA
agttagtgcacaagaggcgttgg

SEQ ID NO: 1859 - DNA, 23 bp, Homo sapiens
  source 1..23: mol_type = genomic DNA
tcgcagagaataagaatcaaagg

SEQ ID NO: 1860 - DNA, 23 bp, Homo sapiens
  source 1..23: mol_type = genomic DNA
atgttccattcaggtatcaaggg

SEQ ID NO: 1861 - DNA, 23 bp, Homo sapiens
  source 1..23: mol_type = genomic DNA
tggggaaaaaacagaccagatgg

SEQ ID NO: 1862 - DNA, 23 bp, Homo sapiens
  source 1..23: mol_type = genomic DNA
ttagttgacaacactgctgaagg

SEQ ID NO: 1863 - DNA, 23 bp, Homo sapiens
  source 1..23: mol_type = genomic DNA
gcttagcataaccataacctagg

SEQ ID NO: 1864 - DNA, 23 bp, Homo sapiens
  source 1..23: mol_type = genomic DNA
agataggaaaaggttagttgagg

SEQ ID NO: 1865 - DNA, 23 bp, Homo sapiens
  source 1..23: mol_type = genomic DNA
gtgagatgtctaccaatgccggg

SEQ ID NO: 1866 - DNA, 23 bp, Homo sapiens
  source 1..23: mol_type = genomic DNA
ggccacctgctcttatgcgtagg

SEQ ID NO: 1867 - DNA, 23 bp, Homo sapiens
  source 1..23: mol_type = genomic DNA
agaaagaaaatatacaaaggagg

SEQ ID NO: 1868 - DNA, 23 bp, Homo sapiens
  source 1..23: mol_type = genomic DNA
cagatgatcctacagttatgagg

SEQ ID NO: 1869 - DNA, 23 bp, Homo sapiens
  source 1..23: mol_type = genomic DNA
atattactcttcagccacctagg

SEQ ID NO: 1870 - DNA, 23 bp, Homo sapiens
  source 1..23: mol_type = genomic DNA
atatctaaatgtgaagttggcgg

SEQ ID NO: 1871 - DNA, 23 bp, Homo sapiens
  source 1..23: mol_type = genomic DNA
gagaggatccaatgccacattgg

SEQ ID NO: 1872 - DNA, 23 bp, Homo sapiens
  source 1..23: mol_type = genomic DNA
aagcactatggtgtgccacttgg

SEQ ID NO: 1873 - DNA, 23 bp, Homo sapiens
  source 1..23: mol_type = genomic DNA
gaatctaggcagctattccaggg

SEQ ID NO: 1874 - DNA, 23 bp, Homo sapiens
  source 1..23: mol_type = genomic DNA
aggaaagggtagttttcaagagg

SEQ ID NO: 1875 - DNA, 23 bp, Homo sapiens
  source 1..23: mol_type = genomic DNA
tgacatcaaggaatattaagtgg

SEQ ID NO: 1876 - DNA, 23 bp, Homo sapiens
  source 1..23: mol_type = genomic DNA
cttgacctagaatcagaagttgg

SEQ ID NO: 1877 - DNA, 23 bp, Homo sapiens
  source 1..23: mol_type = genomic DNA
gttatctaaaataatcagcatgg

SEQ ID NO: 1878 - DNA, 23 bp, Homo sapiens
  source 1..23: mol_type = genomic DNA
gccagcacacaggtgccttgagg

SEQ ID NO: 1879 - DNA, 23 bp, Homo sapiens
  source 1..23: mol_type = genomic DNA
tcataattcatatatacagcagg

SEQ ID NO: 1880 - DNA, 23 bp, Homo sapiens
  source 1..23: mol_type = genomic DNA
gctccccccaccctactgcatgg

SEQ ID NO: 1881 - DNA, 23 bp, Homo sapiens
  source 1..23: mol_type = genomic DNA
tctgtttgatgaaggaggctggg

SEQ ID NO: 1882 - DNA, 23 bp, Homo sapiens
  source 1..23: mol_type = genomic DNA
tgcatctaacataataaagaggg

SEQ ID NO: 1883 - DNA, 23 bp, Homo sapiens
  source 1..23: mol_type = genomic DNA
ccaatgagtgacccacctactgg

SEQ ID NO: 1884 - DNA, 23 bp, Homo sapiens
  source 1..23: mol_type = genomic DNA
atgatgctaaaaaaaattggagg

SEQ ID NO: 1885 - DNA, 23 bp, Homo sapiens
  source 1..23: mol_type = genomic DNA
aaaaactgagcattatgcaaggg

SEQ ID NO: 1886 - DNA, 23 bp, Homo sapiens
  source 1..23: mol_type = genomic DNA
ttctaaaagcaggtgtaagaggg

SEQ ID NO: 1887 - DNA, 23 bp, Homo sapiens
  source 1..23: mol_type = genomic DNA
tatcccagataagagccttaggg

SEQ ID NO: 1888 - DNA, 23 bp, Homo sapiens
  source 1..23: mol_type = genomic DNA
tgatcaaatatgttctagaaggg

SEQ ID NO: 1889 - DNA, 23 bp, Homo sapiens
  source 1..23: mol_type = genomic DNA
attcctacagaactctctgatgg

SEQ ID NO: 1890 - DNA, 23 bp, Homo sapiens
  source 1..23: mol_type = genomic DNA
tatatatacgtggcttatgaggg

SEQ ID NO: 1891 - DNA, 23 bp, Homo sapiens
  source 1..23: mol_type = genomic DNA
acattttcgttggcagtgaaggg

SEQ ID NO: 1892 - DNA, 23 bp, Homo sapiens
  source 1..23: mol_type = genomic DNA
tcgttctgtgttgtcagacaggg

SEQ ID NO: 1893 - DNA, 23 bp, Homo sapiens
  source 1..23: mol_type = genomic DNA
tctggatttaaatttctaagtgg

SEQ ID NO: 1894 - DNA, 23 bp, Homo sapiens
  source 1..23: mol_type = genomic DNA
attttcttagaatatggctaagg

SEQ ID NO: 1895 - DNA, 23 bp, Homo sapiens
  source 1..23: mol_type = genomic DNA
agtgctatcatcctagtgtaggg

SEQ ID NO: 1896 - DNA, 23 bp, Homo sapiens
  source 1..23: mol_type = genomic DNA
gaatggtaagtttgtctgcaggg

SEQ ID NO: 1897 - DNA, 23 bp, Homo sapiens
  source 1..23: mol_type = genomic DNA
ctcagggtaatgcttagaggtgg

SEQ ID NO: 1898 - DNA, 23 bp, Homo sapiens
  source 1..23: mol_type = genomic DNA
tctttttttcacctactcgtagg

SEQ ID NO: 1899 - DNA, 23 bp, Homo sapiens
  source 1..23: mol_type = genomic DNA
aaaataactaggaagcaaaaggg

SEQ ID NO: 1900 - DNA, 23 bp, Homo sapiens
  source 1..23: mol_type = genomic DNA
taatgcccatgtgagaaaagagg

SEQ ID NO: 1901 - DNA, 23 bp, Homo sapiens
  source 1..23: mol_type = genomic DNA
aattgatagcaagatttcaaggg

SEQ ID NO: 1902 - DNA, 23 bp, Homo sapiens
  source 1..23: mol_type = genomic DNA
tatagtttctcaataggaggtgg

SEQ ID NO: 1903 - DNA, 23 bp, Homo sapiens
  source 1..23: mol_type = genomic DNA
atattaagtggcacattgaaggg

SEQ ID NO: 1904 - DNA, 23 bp, Homo sapiens
  source 1..23: mol_type = genomic DNA
tatattactttggaagtgcaggg

SEQ ID NO: 1905 - DNA, 23 bp, Homo sapiens
  source 1..23: mol_type = genomic DNA
gaaaaatcacaaaatcagaatgg

SEQ ID NO: 1906 - DNA, 23 bp, Homo sapiens
  source 1..23: mol_type = genomic DNA
tggcaggatacaggaataccagg

SEQ ID NO: 1907 - DNA, 23 bp, Homo sapiens
  source 1..23: mol_type = genomic DNA
attaggctcaacttttcagtcgg

SEQ ID NO: 1908 - DNA, 23 bp, Homo sapiens
  source 1..23: mol_type = genomic DNA
ctagttgaggacgtgtgcaacgg

SEQ ID NO: 1909 - DNA, 23 bp, Homo sapiens
  source 1..23: mol_type = genomic DNA
tattgtagctcaaatgttggagg

SEQ ID NO: 1910 - DNA, 23 bp, Homo sapiens
  source 1..23: mol_type = genomic DNA
ataaacccttgtttaggccaagg

SEQ ID NO: 1911 - DNA, 23 bp, Homo sapiens
  source 1..23: mol_type = genomic DNA
ataaatacacatttattccacgg

SEQ ID NO: 1912 - DNA, 23 bp, Homo sapiens
  source 1..23: mol_type = genomic DNA
ctacgcaaagtcaccttcagagg

SEQ ID NO: 1913 - DNA, 23 bp, Homo sapiens
  source 1..23: mol_type = genomic DNA
gcatatgagtttgtgagcgaagg

SEQ ID NO: 1914 - DNA, 23 bp, Homo sapiens
  source 1..23: mol_type = genomic DNA
tgatatccaaaaatgaagacagg

SEQ ID NO: 1915 - DNA, 23 bp, Homo sapiens
  source 1..23: mol_type = genomic DNA
ctcttccagcagcttcctagtgg

SEQ ID NO: 1916 - DNA, 23 bp, Homo sapiens
  source 1..23: mol_type = genomic DNA
atttagctctgataattacaagg

SEQ ID NO: 1917 - DNA, 23 bp, Homo sapiens
  source 1..23: mol_type = genomic DNA
atgtgccttcttaaaccagatgg

SEQ ID NO: 1918 - DNA, 23 bp, Homo sapiens
  source 1..23: mol_type = genomic DNA
ctatttcacaccgtaaaagtcgg

SEQ ID NO: 1919 - DNA, 23 bp, Homo sapiens
  source 1..23: mol_type = genomic DNA
agtgtagtcatctttgtggtagg

SEQ ID NO: 1920 - DNA, 23 bp, Homo sapiens
  source 1..23: mol_type = genomic DNA
taatagatgtgagtgtaggttgg

SEQ ID NO: 1921 - DNA, 23 bp, Homo sapiens
  source 1..23: mol_type = genomic DNA
tgagttagaaggtagaggagtgg

SEQ ID NO: 1922 - DNA, 23 bp, Homo sapiens
  source 1..23: mol_type = genomic DNA
gaattaagcgttaacaaagaagg

SEQ ID NO: 1923 - DNA, 23 bp, Homo sapiens
  source 1..23: mol_type = genomic DNA
agttaaaatggcaacaccatggg

SEQ ID NO: 1924 - DNA, 23 bp, Homo sapiens
  source 1..23: mol_type = genomic DNA
atactttgaatctaagggaaagg

SEQ ID NO: 1925 - DNA, 23 bp, Homo sapiens
  source 1..23: mol_type = genomic DNA
atatgttctgtacatcagccggg

SEQ ID NO: 1926 - DNA, 23 bp, Homo sapiens
  source 1..23: mol_type = genomic DNA
cactgtacattgacttcccaggg

SEQ ID NO: 1927 - DNA, 23 bp, Homo sapiens
  source 1..23: mol_type = genomic DNA
tggagaaccatgcagtagggtgg

SEQ ID NO: 1928 - DNA, 23 bp, Homo sapiens
  source 1..23: mol_type = genomic DNA
ctaagtccagtgggtgtctgagg

SEQ ID NO: 1929 - DNA, 23 bp, Homo sapiens
  source 1..23: mol_type = genomic DNA
ttaaaacaagaaagctctagtgg

SEQ ID NO: 1930 - DNA, 23 bp, Homo sapiens
  source 1..23: mol_type = genomic DNA
ataagtatgtttggcagtggtgg

SEQ ID NO: 1931 - DNA, 23 bp, Homo sapiens
  source 1..23: mol_type = genomic DNA
tttatgtttagaatatagaaggg

SEQ ID NO: 1932 - DNA, 23 bp, Homo sapiens
  source 1..23: mol_type = genomic DNA
agtgctttaggctatttcccagg

SEQ ID NO: 1933 - DNA, 23 bp, Homo sapiens
  source 1..23: mol_type = genomic DNA
aatcctcaactcctcttcaaggg

SEQ ID NO: 1934 - DNA, 23 bp, Homo sapiens
  source 1..23: mol_type = genomic DNA
acgtgcatgctttaaggaagggg

SEQ ID NO: 1935 - DNA, 23 bp, Homo sapiens
  source 1..23: mol_type = genomic DNA
aaagggaaaataataagctaggg

SEQ ID NO: 1936 - DNA, 23 bp, Homo sapiens
  source 1..23: mol_type = genomic DNA
ttactaatatctatatagagtgg

SEQ ID NO: 1937 - DNA, 23 bp, Homo sapiens
  source 1..23: mol_type = genomic DNA
gccatacttctgtcaaccactgg

SEQ ID NO: 1938 - DNA, 23 bp, Homo sapiens
  source 1..23: mol_type = genomic DNA
acatcgttatgtgaatgccatgg

SEQ ID NO: 1939 - DNA, 23 bp, Homo sapiens
  source 1..23: mol_type = genomic DNA
catttaatagatgtgagtgtagg

SEQ ID NO: 1940 - DNA, 23 bp, Homo sapiens
  source 1..23: mol_type = genomic DNA
cacgtagtgaagaaatgcaatgg

SEQ ID NO: 1941 - DNA, 23 bp, Homo sapiens
  source 1..23: mol_type = genomic DNA
ggccttgtagttatcccacatgg

SEQ ID NO: 1942 - DNA, 23 bp, Homo sapiens
  source 1..23: mol_type = genomic DNA
ttggattcagagagaggcaatgg

SEQ ID NO: 1943 - DNA, 23 bp, Homo sapiens
  source 1..23: mol_type = genomic DNA
gagttgtgactcgctaaagaagg

SEQ ID NO: 1944 - DNA, 23 bp, Homo sapiens
  source 1..23: mol_type = genomic DNA
aagcttctatctgattgaaaggg

SEQ ID NO: 1945 - DNA, 23 bp, Homo sapiens
  source 1..23: mol_type = genomic DNA
tcatccgtattttataggaaagg

SEQ ID NO: 1946 - DNA, 23 bp, Homo sapiens
  source 1..23: mol_type = genomic DNA
tatcacctcagagatatgctagg

SEQ ID NO: 1947 - DNA, 23 bp, Homo sapiens
  source 1..23: mol_type = genomic DNA
aatttgggcatacttgtatgggg

SEQ ID NO: 1948 - DNA, 23 bp, Homo sapiens
  source 1..23: mol_type = genomic DNA
aacgcgtttaggaaaaatagagg

SEQ ID NO: 1949 - DNA, 23 bp, Homo sapiens
  source 1..23: mol_type = genomic DNA
attttctgatgaaaattcagtgg

SEQ ID NO: 1950 - DNA, 23 bp, Homo sapiens
  source 1..23: mol_type = genomic DNA
ataatcttttgctagggctgagg

SEQ ID NO: 1951 - DNA, 23 bp, Homo sapiens
  source 1..23: mol_type = genomic DNA
tttcagtgaggtaaccagccagg

SEQ ID NO: 1952 - DNA, 23 bp, Homo sapiens
  source 1..23: mol_type = genomic DNA
catgtacctttcaagggagtagg

SEQ ID NO: 1953 - DNA, 23 bp, Homo sapiens
  source 1..23: mol_type = genomic DNA
agatttctaaatggctacacagg

SEQ ID NO: 1954 - DNA, 23 bp, Homo sapiens
  source 1..23: mol_type = genomic DNA
ttaaagcctagagcatagacagg

SEQ ID NO: 1955 - DNA, 23 bp, Homo sapiens
  source 1..23: mol_type = genomic DNA
acccaggtagtatcgctgacagg

SEQ ID NO: 1956 - DNA, 23 bp, Homo sapiens
  source 1..23: mol_type = genomic DNA
aatcctcctgaaagtttgcatgg

SEQ ID NO: 1957 - DNA, 23 bp, Homo sapiens
  source 1..23: mol_type = genomic DNA
tcctcagatgtctatgcgaaagg

SEQ ID NO: 1958 - DNA, 23 bp, Homo sapiens
  source 1..23: mol_type = genomic DNA
cagtagctcagaatgagataggg

SEQ ID NO: 1959 - DNA, 23 bp, Homo sapiens
  source 1..23: mol_type = genomic DNA
ccaaaagcagagtggaagaaggg

SEQ ID NO: 1960 - DNA, 23 bp, Homo sapiens
  source 1..23: mol_type = genomic DNA
atcatttctccatggttgggtgg

SEQ ID NO: 1961 - DNA, 23 bp, Homo sapiens
  source 1..23: mol_type = genomic DNA
tttaacataaaaagtagaagagg

SEQ ID NO: 1962 - DNA, 23 bp, Homo sapiens
  source 1..23: mol_type = genomic DNA
cttttttaaggatgaaggagggg

SEQ ID NO: 1963 - DNA, 23 bp, Homo sapiens
  source 1..23: mol_type = genomic DNA
cttttattaaactacacaagtgg

SEQ ID NO: 1964 - DNA, 23 bp, Homo sapiens
  source 1..23: mol_type = genomic DNA
caaacttgctgtaaccctatggg

SEQ ID NO: 1965 - DNA, 23 bp, Homo sapiens
  source 1..23: mol_type = genomic DNA
aaaattctctaataaactggagg

SEQ ID NO: 1966 - DNA, 23 bp, Homo sapiens
  source 1..23: mol_type = genomic DNA
atttccccgttttcatactgagg

SEQ ID NO: 1967 - DNA, 23 bp, Homo sapiens
  source 1..23: mol_type = genomic DNA
tattgcatgactcaaatacatgg

SEQ ID NO: 1968 - DNA, 23 bp, Homo sapiens
  source 1..23: mol_type = genomic DNA
tccaattacaataatcaaagagg

SEQ ID NO: 1969 - DNA, 23 bp, Homo sapiens
  source 1..23: mol_type = genomic DNA
tcgagccccgcgagaaggagggg

SEQ ID NO: 1970 - DNA, 23 bp, Homo sapiens
  source 1..23: mol_type = genomic DNA
gtatatgaaaaggtgttaagtgg

SEQ ID NO: 1971 - DNA, 23 bp, Homo sapiens
  source 1..23: mol_type = genomic DNA
catatgcctcactaaggtcctgg

SEQ ID NO: 1972 - DNA, 23 bp, Homo sapiens
  source 1..23: mol_type = genomic DNA
gagaactgtttgtatggctaggg

SEQ ID NO: 1973 - DNA, 23 bp, Homo sapiens
  source 1..23: mol_type = genomic DNA
tcagacagactatcattcaaagg

SEQ ID NO: 1974 - DNA, 23 bp, Homo sapiens
  source 1..23: mol_type = genomic DNA
actctcctgaagcataaacttgg

SEQ ID NO: 1975 - DNA, 23 bp, Homo sapiens
  source 1..23: mol_type = genomic DNA
ataatcttacattctccccatgg

SEQ ID NO: 1976 - DNA, 23 bp, Homo sapiens
  source 1..23: mol_type = genomic DNA
atattataaattaggccataggg

SEQ ID NO: 1977 - DNA, 23 bp, Homo sapiens
  source 1..23: mol_type = genomic DNA
atgtacctcatttgctaacgtgg

SEQ ID NO: 1978 - DNA, 23 bp, Homo sapiens
  source 1..23: mol_type = genomic DNA
tagtgagtgtcctcattctaggg

SEQ ID NO: 1979 - DNA, 23 bp, Homo sapiens
  source 1..23: mol_type = genomic DNA
tctgtgtttctggatgaaatggg

SEQ ID NO: 1980 - DNA, 23 bp, Homo sapiens
  source 1..23: mol_type = genomic DNA
agacgtacataaactaccaatgg

SEQ ID NO: 1981 - DNA, 23 bp, Homo sapiens
  source 1..23: mol_type = genomic DNA
acaattggctcctagaaggttgg

SEQ ID NO: 1982 - DNA, 23 bp, Homo sapiens
  source 1..23: mol_type = genomic DNA
ttccgcccctccttctcgcgggg

SEQ ID NO: 1983 - DNA, 23 bp, Homo sapiens
  source 1..23: mol_type = genomic DNA
tatggaccaagaataatgaatgg

SEQ ID NO: 1984 - DNA, 23 bp, Homo sapiens
  source 1..23: mol_type = genomic DNA
gctatgcattagaaggaagtagg

SEQ ID NO: 1985 - DNA, 23 bp, Homo sapiens
  source 1..23: mol_type = genomic DNA
atttcagctgctcaaatggaagg

SEQ ID NO: 1986 - DNA, 23 bp, Homo sapiens
  source 1..23: mol_type = genomic DNA
tcttatgtaaagaacacaaaagg

SEQ ID NO: 1987 - DNA, 23 bp, Homo sapiens
  source 1..23: mol_type = genomic DNA
ggcttcatgcaaaatactgaagg

SEQ ID NO: 1988 - DNA, 23 bp, Homo sapiens
  source 1..23: mol_type = genomic DNA
ctcataggcaatgtattccaagg

SEQ ID NO: 1989 - DNA, 23 bp, Homo sapiens
  source 1..23: mol_type = genomic DNA
gaaattcctgtaaaacccatagg

SEQ ID NO: 1990 - DNA, 23 bp, Homo sapiens
  source 1..23: mol_type = genomic DNA
agttgtttctcaggcatctgtgg

SEQ ID NO: 1991 - DNA, 23 bp, Homo sapiens
  source 1..23: mol_type = genomic DNA
ccatcaacccagtattatgtagg

SEQ ID NO: 1992 - DNA, 23 bp, Homo sapiens
  source 1..23: mol_type = genomic DNA
atttgtaatacaaattacgatgg

SEQ ID NO: 1993 - DNA, 23 bp, Homo sapiens
  source 1..23: mol_type = genomic DNA
ctctgagcaacatattacaatgg

SEQ ID NO: 1994 - DNA, 23 bp, Homo sapiens
  source 1..23: mol_type = genomic DNA
caacacccagattaaggcatcgg

SEQ ID NO: 1995 - DNA, 23 bp, Homo sapiens
  source 1..23: mol_type = genomic DNA
caaaaccccaaagattgttacgg

SEQ ID NO: 1996 - DNA, 23 bp, Homo sapiens
  source 1..23: mol_type = genomic DNA
acatgtcatatgctttcccatgg

SEQ ID NO: 1997 - DNA, 23 bp, Homo sapiens
  source 1..23: mol_type = genomic DNA
atactaaacaattgataccatgg

SEQ ID NO: 1998 - DNA, 23 bp, Homo sapiens
  source 1..23: mol_type = genomic DNA
tgtggtcaccaagtcacctgtgg

SEQ ID NO: 1999 - DNA, 23 bp, Homo sapiens
  source 1..23: mol_type = genomic DNA
tgagtattaattaggacacttgg

SEQ ID NO: 2000 - DNA, 23 bp, Homo sapiens
  source 1..23: mol_type = genomic DNA
caaatcaagcaacactcacacgg

SEQ ID NO: 2001 - DNA, 23 bp, Homo sapiens
  source 1..23: mol_type = genomic DNA
actcatctgtaatttcaagttgg

SEQ ID NO: 2002 - DNA, 23 bp, Homo sapiens
  source 1..23: mol_type = genomic DNA
aactctatagtgataacagctgg

SEQ ID NO: 2003 - DNA, 23 bp, Homo sapiens
  source 1..23: mol_type = genomic DNA
gtaacatgttttgattgaaacgg

SEQ ID NO: 2004 - DNA, 23 bp, Homo sapiens
  source 1..23: mol_type = genomic DNA
aagtcatgtttttcaaacaacgg

SEQ ID NO: 2005 - DNA, 23 bp, Homo sapiens
  source 1..23: mol_type = genomic DNA
cctgcatttaacgcattaggagg

SEQ ID NO: 2006 - DNA, 23 bp, Homo sapiens
  source 1..23: mol_type = genomic DNA
atatgtatgtatatattcatggg

SEQ ID NO: 2007 - DNA, 23 bp, Homo sapiens
  source 1..23: mol_type = genomic DNA
aggcggtagctatttaggcttgg

SEQ ID NO: 2008 - DNA, 23 bp, Homo sapiens
  source 1..23: mol_type = genomic DNA
cagcatatgctaattgcgtatgg

SEQ ID NO: 2009 - DNA, 23 bp, Homo sapiens
  source 1..23: mol_type = genomic DNA
tatattatataaggcctggatgg

SEQ ID NO: 2010 - DNA, 23 bp, Homo sapiens
  source 1..23: mol_type = genomic DNA
agaaaattagttcttgcctaggg

SEQ ID NO: 2011 - DNA, 23 bp, Homo sapiens
  source 1..23: mol_type = genomic DNA
tctggctgactaattagcaatgg

SEQ ID NO: 2012 - DNA, 23 bp, Homo sapiens
  source 1..23: mol_type = genomic DNA
acagaagtaagcgggttagaggg

SEQ ID NO: 2013 - DNA, 23 bp, Homo sapiens
  source 1..23: mol_type = genomic DNA
ggaaagtcctttttttacaaggg

SEQ ID NO: 2014 - DNA, 23 bp, Homo sapiens
  source 1..23: mol_type = genomic DNA
gctagaatgactctcagcctagg

SEQ ID NO: 2015 - DNA, 23 bp, Homo sapiens
  source 1..23: mol_type = genomic DNA
aagaaaccattgctgtgagaggg

SEQ ID NO: 2016 - DNA, 23 bp, Homo sapiens
  source 1..23: mol_type = genomic DNA
ggaagggtggaataatgtctagg

SEQ ID NO: 2017 - DNA, 23 bp, Homo sapiens
  source 1..23: mol_type = genomic DNA
ctaaccattatagaattcctggg

SEQ ID NO: 2018 - DNA, 23 bp, Homo sapiens
  source 1..23: mol_type = genomic DNA
ctacgctctttgcagcctcaagg

SEQ ID NO: 2019 - DNA, 23 bp, Homo sapiens
  source 1..23: mol_type = genomic DNA
tctgagcagagatcaactgctgg

SEQ ID NO: 2020 - DNA, 23 bp, Homo sapiens
  source 1..23: mol_type = genomic DNA
gcaatgctatatagatgagcagg

SEQ ID NO: 2021 - DNA, 23 bp, Homo sapiens
  source 1..23: mol_type = genomic DNA
agtcaatcagctgaaagccttgg

SEQ ID NO: 2022 - DNA, 23 bp, Homo sapiens
  source 1..23: mol_type = genomic DNA
acctgtatatgtaatttccaagg

SEQ ID NO: 2023 - DNA, 23 bp, Homo sapiens
  source 1..23: mol_type = genomic DNA
tacctgtggtctaaaaaagtcgg

SEQ ID NO: 2024 - DNA, 23 bp, Homo sapiens
  source 1..23: mol_type = genomic DNA
tgcatatcctcagggttcatcgg

SEQ ID NO: 2025 - DNA, 23 bp, Homo sapiens
  source 1..23: mol_type = genomic DNA
tcctgggagctaatcaaaagagg

SEQ ID NO: 2026 - DNA, 23 bp, Homo sapiens
  source 1..23: mol_type = genomic DNA
gtaaatcctctcattaagatggg

SEQ ID NO: 2027 - DNA, 23 bp, Homo sapiens
  source 1..23: mol_type = genomic DNA
agaagtcagttcgaactccctgg

SEQ ID NO: 2028 - DNA, 23 bp, Homo sapiens
  source 1..23: mol_type = genomic DNA
gaaaggataatataatgagttgg

SEQ ID NO: 2029 - DNA, 23 bp, Homo sapiens
  source 1..23: mol_type = genomic DNA
aatatggcagataaattgcaagg

SEQ ID NO: 2030 - DNA, 23 bp, Homo sapiens
  source 1..23: mol_type = genomic DNA
actctttaaccaaaaggctgtgg

SEQ ID NO: 2031 - DNA, 23 bp, Homo sapiens
  source 1..23: mol_type = genomic DNA
attctgataaccccttcgaatgg

SEQ ID NO: 2032 - DNA, 23 bp, Homo sapiens
  source 1..23: mol_type = genomic DNA
gtgcctaccaagagaagaagagg

SEQ ID NO: 2033 - DNA, 23 bp, Homo sapiens
  source 1..23: mol_type = genomic DNA
tgtgggaaatcggagatggcagg

SEQ ID NO: 2034 - DNA, 23 bp, Homo sapiens
  source 1..23: mol_type = genomic DNA
tgctatctaggtttaagtgaggg

SEQ ID NO: 2035 - DNA, 23 bp, Homo sapiens
  source 1..23: mol_type = genomic DNA
attttgatgtcattaccataggg

SEQ ID NO: 2036 - DNA, 23 bp, Homo sapiens
  source 1..23: mol_type = genomic DNA
tgaaaacagttacctcccattgg

SEQ ID NO: 2037 - DNA, 23 bp, Homo sapiens
  source 1..23: mol_type = genomic DNA
ctgatttagtagacgctgaaggg

SEQ ID NO: 2038 - DNA, 23 bp, Homo sapiens
  source 1..23: mol_type = genomic DNA
acttggcaatccaagcaagatgg

SEQ ID NO: 2039 - DNA, 23 bp, Homo sapiens
  source 1..23: mol_type = genomic DNA
aaagattcatcccagtttagcgg

SEQ ID NO: 2040 - DNA, 23 bp, Homo sapiens
  source 1..23: mol_type = genomic DNA
tatatgatagtctattaacttgg

SEQ ID NO: 2041 - DNA, 23 bp, Homo sapiens
  source 1..23: mol_type = genomic DNA
tccagctaggacaggcctgaggg

SEQ ID NO: 2042 - DNA, 23 bp, Homo sapiens
  source 1..23: mol_type = genomic DNA
tatggtactgggattgtagtggg

SEQ ID NO: 2043 - DNA, 23 bp, Homo sapiens
  source 1..23: mol_type = genomic DNA
attagaaacacaacacagccagg

SEQ ID NO: 2044 - DNA, 23 bp, Homo sapiens
  source 1..23: mol_type = genomic DNA
ataatgcacaaatataaagaagg

SEQ ID NO: 2045 - DNA, 23 bp, Homo sapiens
  source 1..23: mol_type = genomic DNA
ggtaaacgtggcagaaagcaggg

SEQ ID NO: 2046 - DNA, 23 bp, Homo sapiens
  source 1..23: mol_type = genomic DNA
tatgccttaatttcagcctgtgg

SEQ ID NO: 2047 - DNA, 23 bp, Homo sapiens
  source 1..23: mol_type = genomic DNA
gctattccaggggccagatgggg

SEQ ID NO: 2048 - DNA, 23 bp, Homo sapiens
  source 1..23: mol_type = genomic DNA
aacagaattcactatctctaggg

SEQ ID NO: 2049 - DNA, 23 bp, Homo sapiens
  source 1..23: mol_type = genomic DNA
atatttactgaacattacattgg

SEQ ID NO: 2050 - DNA, 23 bp, Homo sapiens
  source 1..23: mol_type = genomic DNA
ctttctagctgaggatgagtagg

SEQ ID NO: 2051 - DNA, 23 bp, Homo sapiens
  source 1..23: mol_type = genomic DNA
aacaagaactaaatttgccaggg

SEQ ID NO: 2052 - DNA, 23 bp, Homo sapiens
  source 1..23: mol_type = genomic DNA
ggttctgtttgacttttgaaagg

SEQ ID NO: 2053 - DNA, 23 bp, Homo sapiens
  source 1..23: mol_type = genomic DNA
atgtatggcagaagaactaaagg

SEQ ID NO: 2054 - DNA, 23 bp, Homo sapiens
  source 1..23: mol_type = genomic DNA
tgagctctgtttgatgaaggagg

SEQ ID NO: 2055 - DNA, 23 bp, Homo sapiens
  source 1..23: mol_type = genomic DNA
aatacaaaacaaacacaagtagg

SEQ ID NO: 2056 - DNA, 23 bp, Homo sapiens
  source 1..23: mol_type = genomic DNA
gcttctagtttcactaggaacgg

SEQ ID NO: 2057 - DNA, 23 bp, Homo sapiens
  source 1..23: mol_type = genomic DNA
cataactctgacataatcgttgg

SEQ ID NO: 2058 - DNA, 23 bp, Homo sapiens
  source 1..23: mol_type = genomic DNA
acttacctagttatttactctgg

SEQ ID NO: 2059 - DNA, 23 bp, Homo sapiens
  source 1..23: mol_type = genomic DNA
agtcctttctacagttcccaagg

SEQ ID NO: 2060 - DNA, 23 bp, Homo sapiens
  source 1..23: mol_type = genomic DNA
cccaggaaacaacttgaaagagg

SEQ ID NO: 2061 - DNA, 23 bp, Homo sapiens
  source 1..23: mol_type = genomic DNA
ctatcttctagagagttgacagg

SEQ ID NO: 2062 - DNA, 23 bp, Homo sapiens
  source 1..23: mol_type = genomic DNA
tctcaattagtacaaagccatgg

SEQ ID NO: 2063 - DNA, 23 bp, Homo sapiens
  source 1..23: mol_type = genomic DNA
acatattcaaaaatagaggttgg

SEQ ID NO: 2064 - DNA, 23 bp, Homo sapiens
  source 1..23: mol_type = genomic DNA
aattagttcttgcctagggaagg

SEQ ID NO: 2065 - DNA, 23 bp, Homo sapiens
  source 1..23: mol_type = genomic DNA
cagtggttaggaggaaggagagg

SEQ ID NO: 2066 - DNA, 23 bp, Homo sapiens
  source 1..23: mol_type = genomic DNA
ttttctaagtggacttaggaagg

SEQ ID NO: 2067 - DNA, 23 bp, Homo sapiens
  source 1..23: mol_type = genomic DNA
tgtgactgatatgaattcaaggg

SEQ ID NO: 2068 - DNA, 23 bp, Homo sapiens
  source 1..23: mol_type = genomic DNA
gcttgatagtatttcaccacagg

SEQ ID NO: 2069 - DNA, 23 bp, Homo sapiens
  source 1..23: mol_type = genomic DNA
ttcaggttctcgatgatgcaagg

SEQ ID NO: 2070 - DNA, 23 bp, Homo sapiens
  source 1..23: mol_type = genomic DNA
tcgctaagcttgtcaccacatgg

SEQ ID NO: 2071 - DNA, 23 bp, Homo sapiens
  source 1..23: mol_type = genomic DNA
ggaaaattgcagaatgcagaggg

SEQ ID NO: 2072 - DNA, 23 bp, Homo sapiens
  source 1..23: mol_type = genomic DNA
tcatccagcaccattaaagaagg

SEQ ID NO: 2073 - DNA, 23 bp, Homo sapiens
  source 1..23: mol_type = genomic DNA
ctaacttaccttacttgcaaagg

SEQ ID NO: 2074 - DNA, 23 bp, Homo sapiens
  source 1..23: mol_type = genomic DNA
ataaatggagtaaaagttgaggg

SEQ ID NO: 2075 - DNA, 23 bp, Homo sapiens
  source 1..23: mol_type = genomic DNA
aacgttataggcccataaaaggg

SEQ ID NO: 2076 - DNA, 23 bp, Homo sapiens
  source 1..23: mol_type = genomic DNA
tatcaaatttgttaaacaggtgg

SEQ ID NO: 2077 - DNA, 23 bp, Homo sapiens
  source 1..23: mol_type = genomic DNA
aagattgcgaacatagcaaaagg

SEQ ID NO: 2078 - DNA, 23 bp, Homo sapiens
  source 1..23: mol_type = genomic DNA
gttttcaaatttaagccagaggg

SEQ ID NO: 2079 - DNA, 23 bp, Homo sapiens
  source 1..23: mol_type = genomic DNA
agtgtgcttcttatgtcctgagg

SEQ ID NO: 2080 - DNA, 23 bp, Homo sapiens
  source 1..23: mol_type = genomic DNA
aatccaaacagtgttcatatggg

SEQ ID NO: 2081 - DNA, 23 bp, Homo sapiens
  source 1..23: mol_type = genomic DNA
gtgccgtgctacttaagagaagg

SEQ ID NO: 2082 - DNA, 23 bp, Homo sapiens
  source 1..23: mol_type = genomic DNA
gtataatctatttgagggcaggg

SEQ ID NO: 2083 - DNA, 23 bp, Homo sapiens
  source 1..23: mol_type = genomic DNA
aaacttcatgtacctttcaaggg

SEQ ID NO: 2084 - DNA, 23 bp, Homo sapiens
  source 1..23: mol_type = genomic DNA
ttattgctgaagcatgtgatagg

SEQ ID NO: 2085 - DNA, 23 bp, Homo sapiens
  source 1..23: mol_type = genomic DNA
ctacaatcccagtaccatacagg

SEQ ID NO: 2086 - DNA, 23 bp, Homo sapiens
  source 1..23: mol_type = genomic DNA
acctcagaggttacaaaggaggg

SEQ ID NO: 2087 - DNA, 23 bp, Homo sapiens
  source 1..23: mol_type = genomic DNA
atataaactaaatttttccaagg

SEQ ID NO: 2088 - DNA, 23 bp, Homo sapiens
  source 1..23: mol_type = genomic DNA
gaatcattattatcaacagaagg

SEQ ID NO: 2089 - DNA, 23 bp, Homo sapiens
  source 1..23: mol_type = genomic DNA
gatcacaaaatatctctcaaagg

SEQ ID NO: 2090 - DNA, 23 bp, Homo sapiens
  source 1..23: mol_type = genomic DNA
ttcatggtcctcgatgctgaggg

SEQ ID NO: 2091 - DNA, 23 bp, Homo sapiens
  source 1..23: mol_type = genomic DNA
ttttttcccctgagttactgagg

SEQ ID NO: 2092 - DNA, 23 bp, Homo sapiens
  source 1..23: mol_type = genomic DNA
tgcaatgtgtggtatatgagtgg

SEQ ID NO: 2093 - DNA, 23 bp, Homo sapiens
  source 1..23: mol_type = genomic DNA
cagaaatgagaacacagggttgg

SEQ ID NO: 2094 - DNA, 23 bp, Homo sapiens
  source 1..23: mol_type = genomic DNA
ttctaatatccctctcccaaagg

SEQ ID NO: 2095 - DNA, 23 bp, Homo sapiens
  source 1..23: mol_type = genomic DNA
tggcataatcatttgcccatggg

SEQ ID NO: 2096 - DNA, 23 bp, Homo sapiens
  source 1..23: mol_type = genomic DNA
ccccatgtgggataactacaagg

SEQ ID NO: 2097 - DNA, 23 bp, Homo sapiens
  source 1..23: mol_type = genomic DNA
gtaggatcatctgccgctgatgg

SEQ ID NO: 2098 - DNA, 23 bp, Homo sapiens
  source 1..23: mol_type = genomic DNA
agtggcttagctgtaaatagagg

SEQ ID NO: 2099 - DNA, 23 bp, Homo sapiens
  source 1..23: mol_type = genomic DNA
gtagacatagagctcagaatagg

SEQ ID NO: 2100 - DNA, 23 bp, Homo sapiens
  source 1..23: mol_type = genomic DNA
ctttttagcaacctattccaagg

SEQ ID NO: 2101 - DNA, 23 bp, Homo sapiens
  source 1..23: mol_type = genomic DNA
agacacagctataaggaaagagg

SEQ ID NO: 2102 - DNA, 23 bp, Homo sapiens
  source 1..23: mol_type = genomic DNA
ttaatgggaattgacaaaaaggg

SEQ ID NO: 2103 - DNA, 23 bp, Homo sapiens
  source 1..23: mol_type = genomic DNA
ttctattttcaggaacctaaggg

SEQ ID NO: 2104 - DNA, 23 bp, Homo sapiens
  source 1..23: mol_type = genomic DNA
ttactcttattgagaaagctcgg

SEQ ID NO: 2105 - DNA, 23 bp, Homo sapiens
  source 1..23: mol_type = genomic DNA
atttgttacaaaaatcaagatgg

SEQ ID NO: 2106 - DNA, 23 bp, Homo sapiens
  source 1..23: mol_type = genomic DNA
aaatacaccttggaatatcaggg

SEQ ID NO: 2107 - DNA, 23 bp, Homo sapiens
  source 1..23: mol_type = genomic DNA
gtcacatgatgcaggcagctggg

SEQ ID NO: 2108 - DNA, 23 bp, Homo sapiens
  source 1..23: mol_type = genomic DNA
gatgaggagaagggtaggagagg

SEQ ID NO: 2109 - DNA, 23 bp, Homo sapiens
  source 1..23: mol_type = genomic DNA
catttttcagagaagaagagagg

SEQ ID NO: 2110 - DNA, 23 bp, Homo sapiens
  source 1..23: mol_type = genomic DNA
ttattggaatttgttatggaggg

SEQ ID NO: 2111 - DNA, 23 bp, Homo sapiens
  source 1..23: mol_type = genomic DNA
catttgctttgccactcacatgg

SEQ ID NO: 2112 - DNA, 23 bp, Homo sapiens
  source 1..23: mol_type = genomic DNA
ctttccctagaaaaaaaatgtgg

SEQ ID NO: 2113 - DNA, 23 bp, Homo sapiens
  source 1..23: mol_type = genomic DNA
gaaaacaatttctcaatccacgg

SEQ ID NO: 2114 - DNA, 23 bp, Homo sapiens
  source 1..23: mol_type = genomic DNA
gctatttttaggtttggggtagg

SEQ ID NO: 2115 - DNA, 23 bp, Homo sapiens
  source 1..23: mol_type = genomic DNA
catctgatttcaaatctgcatgg

SEQ ID NO: 2116 - DNA, 23 bp, Homo sapiens
  source 1..23: mol_type = genomic DNA
ataaggagatacaaaacagatgg

SEQ ID NO: 2117 - DNA, 23 bp, Homo sapiens
  source 1..23: mol_type = genomic DNA
gtgttagatacaatgcaggccgg

SEQ ID NO: 2118 - DNA, 23 bp, Homo sapiens
  source 1..23: mol_type = genomic DNA
cctcttataaagacgagagcagg

SEQ ID NO: 2119 - DNA, 23 bp, Homo sapiens
  source 1..23: mol_type = genomic DNA
gccaaatagggatacctcaaagg

SEQ ID NO: 2120 - DNA, 23 bp, Homo sapiens
  source 1..23: mol_type = genomic DNA
ttatagttttatctggcctgggg

SEQ ID NO: 2121 - DNA, 23 bp, Homo sapiens
  source 1..23: mol_type = genomic DNA
gggagcagaagaattagaaatgg

SEQ ID NO: 2122 - DNA, 23 bp, Homo sapiens
  source 1..23: mol_type = genomic DNA
agggacaaaataaagtcagttgg

SEQ ID NO: 2123 - DNA, 23 bp, Homo sapiens
  source 1..23: mol_type = genomic DNA
tgtgaaacataccaaaggaaagg

SEQ ID NO: 2124 - DNA, 23 bp, Homo sapiens
  source 1..23: mol_type = genomic DNA
ataattatgccatattcagatgg

SEQ ID NO: 2125 - DNA, 23 bp, Homo sapiens
  source 1..23: mol_type = genomic DNA
tgaaccttccctcaatactaagg

SEQ ID NO: 2126 - DNA, 23 bp, Homo sapiens
  source 1..23: mol_type = genomic DNA
cagctgggtcgacatcaacttgg

SEQ ID NO: 2127 - DNA, 23 bp, Homo sapiens
  source 1..23: mol_type = genomic DNA
gtattaagcgaagccatggcagg

SEQ ID NO: 2128 - DNA, 23 bp, Homo sapiens
  source 1..23: mol_type = genomic DNA
acgtagtgaagaaatgcaatggg

SEQ ID NO: 2129 - DNA, 23 bp, Homo sapiens
  source 1..23: mol_type = genomic DNA
gatgaagtttggacaatggatgg

SEQ ID NO: 2130 - DNA, 23 bp, Homo sapiens
  source 1..23: mol_type = genomic DNA
agcagctgcagagtgttctgagg

SEQ ID NO: 2131 - DNA, 23 bp, Homo sapiens
  source 1..23: mol_type = genomic DNA
atgctaacctgaaattgtatggg

SEQ ID NO: 2132 - DNA, 23 bp, Homo sapiens
  source 1..23: mol_type = genomic DNA
ttaaggtgcgtataaactcatgg

SEQ ID NO: 2133 - DNA, 23 bp, Homo sapiens
  source 1..23: mol_type = genomic DNA
agctaaagagtaaatcaggcagg

SEQ ID NO: 2134 - DNA, 23 bp, Homo sapiens
  source 1..23: mol_type = genomic DNA
ggtgtttcttacctgatggaagg

SEQ ID NO: 2135 - DNA, 23 bp, Homo sapiens
  source 1..23: mol_type = genomic DNA
catcaaggtgaatgggaaagtgg

SEQ ID NO: 2136 - DNA, 23 bp, Homo sapiens
  source 1..23: mol_type = genomic DNA
gtaatgctttctcttgtgaaagg

SEQ ID NO: 2137 - DNA, 23 bp, Homo sapiens
  source 1..23: mol_type = genomic DNA
gaaaaaatgagagctgaagatgg

SEQ ID NO: 2138 - DNA, 23 bp, Homo sapiens
  source 1..23: mol_type = genomic DNA
tgttttcatgcatatcctcaggg

SEQ ID NO: 2139 - DNA, 23 bp, Homo sapiens
  source 1..23: mol_type = genomic DNA
aaatctaagtggaagtccaaggg

SEQ ID NO: 2140 - DNA, 23 bp, Homo sapiens
  source 1..23: mol_type = genomic DNA
ccaggaaaaggggttcaagaagg

SEQ ID NO: 2141 - DNA, 23 bp, Homo sapiens
  source 1..23: mol_type = genomic DNA
ctactttttcaggtattgtgggg

SEQ ID NO: 2142 - DNA, 23 bp, Homo sapiens
  source 1..23: mol_type = genomic DNA
tatgtgtctacgttgctggatgg

SEQ ID NO: 2143 - DNA, 23 bp, Homo sapiens
  source 1..23: mol_type = genomic DNA
tttcagcttctagtttcactagg

SEQ ID NO: 2144 - DNA, 23 bp, Homo sapiens
  source 1..23: mol_type = genomic DNA
gcagtataggctttaaagtaggg

SEQ ID NO: 2145 - DNA, 23 bp, Homo sapiens
  source 1..23: mol_type = genomic DNA
gttggactcagaaaccagattgg

SEQ ID NO: 2146 - DNA, 23 bp, Homo sapiens
  source 1..23: mol_type = genomic DNA
tggtcctcatcaaagtccgctgg

SEQ ID NO: 2147 - DNA, 23 bp, Homo sapiens
  source 1..23: mol_type = genomic DNA
aagtcactgatatttaatagagg

SEQ ID NO: 2148 - DNA, 23 bp, Homo sapiens
  source 1..23: mol_type = genomic DNA
gtacatcacagcaaaataagtgg

SEQ ID NO: 2149 - DNA, 23 bp, Homo sapiens
  source 1..23: mol_type = genomic DNA
cattttgctgaatttaattgggg

SEQ ID NO: 2150 - DNA, 23 bp, Homo sapiens
  source 1..23: mol_type = genomic DNA
aataccagataaatgtagctcgg

SEQ ID NO: 2151 - DNA, 23 bp, Homo sapiens
  source 1..23: mol_type = genomic DNA
gccacctgctcttatgcgtaggg

SEQ ID NO: 2152 - DNA, 23 bp, Homo sapiens
  source 1..23: mol_type = genomic DNA
taaccagtaaccgctaaaagagg

SEQ ID NO: 2153 - DNA, 23 bp, Homo sapiens
  source 1..23: mol_type = genomic DNA
tcagaagcaggcttccctaaagg

SEQ ID NO: 2154 - DNA, 23 bp, Homo sapiens
  source 1..23: mol_type = genomic DNA
tatctccaacaacggaaaagagg

SEQ ID NO: 2155 - DNA, 23 bp, Homo sapiens
  source 1..23: mol_type = genomic DNA
atataaatataagggaatgttgg

SEQ ID NO: 2156 - DNA, 23 bp, Homo sapiens
  source 1..23: mol_type = genomic DNA
ctcgagccccgcgagaaggaggg

SEQ ID NO: 2157 - DNA, 23 bp, Homo sapiens
  source 1..23: mol_type = genomic DNA
tcttaaagacagtatacaaacgg

SEQ ID NO: 2158 - DNA, 23 bp, Homo sapiens
  source 1..23: mol_type = genomic DNA
atttgaggggatgtcacaatggg

SEQ ID NO: 2159 - DNA, 23 bp, Homo sapiens
  source 1..23: mol_type = genomic DNA
gttacttagtaattctctgtagg

SEQ ID NO: 2160 - DNA, 23 bp, Homo sapiens
  source 1..23: mol_type = genomic DNA
tatcagcagatccatctgcttgg

SEQ ID NO: 2161 - DNA, 23 bp, Homo sapiens
  source 1..23: mol_type = genomic DNA
tttatagtccatcatttgcaggg

SEQ ID NO: 2162 - DNA, 23 bp, Homo sapiens
  source 1..23: mol_type = genomic DNA
tttcatgtagttgggatcaaggg

SEQ ID NO: 2163 - DNA, 23 bp, Homo sapiens
  source 1..23: mol_type = genomic DNA
gaattttgtcacttagagaaggg

SEQ ID NO: 2164 - DNA, 23 bp, Homo sapiens
  source 1..23: mol_type = genomic DNA
attatttgctagcctcatgtagg

SEQ ID NO: 2165 - DNA, 23 bp, Homo sapiens
  source 1..23: mol_type = genomic DNA
cattcatttggcctttggagagg

SEQ ID NO: 2166 - DNA, 23 bp, Homo sapiens
  source 1..23: mol_type = genomic DNA
cctaaaagttagtgcacaagagg

SEQ ID NO: 2167 - DNA, 23 bp, Homo sapiens
  source 1..23: mol_type = genomic DNA
ttgcctgctcttcaggtgcgtgg

SEQ ID NO: 2168 - DNA, 23 bp, Homo sapiens
  source 1..23: mol_type = genomic DNA
gagaaagaacacctgtgcattgg

SEQ ID NO: 2169 - DNA, 23 bp, Homo sapiens
  source 1..23: mol_type = genomic DNA
ttatctgtgaatcacccaatggg

SEQ ID NO: 2170 - DNA, 23 bp, Homo sapiens
  source 1..23: mol_type = genomic DNA
cctccctaataccagtgaaaggg

SEQ ID NO: 2171 - DNA, 23 bp, Homo sapiens
  source 1..23: mol_type = genomic DNA
tcttttttaaggatgaaggaggg

SEQ ID NO: 2172 - DNA, 23 bp, Homo sapiens
  source 1..23: mol_type = genomic DNA
gagttattttaaatgtatagggg

SEQ ID NO: 2173 - DNA, 23 bp, Homo sapiens
  source 1..23: mol_type = genomic DNA
gagacagaaatgaaaaatcaggg

SEQ ID NO: 2174 - DNA, 23 bp, Homo sapiens
  source 1..23: mol_type = genomic DNA
atcttttcttgagtagcgaaagg

SEQ ID NO: 2175 - DNA, 23 bp, Homo sapiens
  source 1..23: mol_type = genomic DNA
actttggtactattccatagtgg

SEQ ID NO: 2176 - DNA, 23 bp, Homo sapiens
  source 1..23: mol_type = genomic DNA
aagtttgaagaacttttaccagg

SEQ ID NO: 2177 - DNA, 23 bp, Homo sapiens
  source 1..23: mol_type = genomic DNA
agtgtaaataaaccaactgatgg

SEQ ID NO: 2178 - DNA, 23 bp, Homo sapiens
  source 1..23: mol_type = genomic DNA
aaacatttcttgccattcaaggg

SEQ ID NO: 2179 - DNA, 23 bp, Homo sapiens
  source 1..23: mol_type = genomic DNA
tatttcagagaaaaaatatgtgg

SEQ ID NO: 2180 - DNA, 23 bp, Homo sapiens
  source 1..23: mol_type = genomic DNA
aaggcagaagttttgccactggg

SEQ ID NO: 2181 - DNA, 23 bp, Homo sapiens
  source 1..23: mol_type = genomic DNA
agttctgccaggtttatgtacgg

SEQ ID NO: 2182 - DNA, 23 bp, Homo sapiens
  source 1..23: mol_type = genomic DNA
ttaattaaaaggaacgaaagtgg

SEQ ID NO: 2183 - DNA, 23 bp, Homo sapiens
  source 1..23: mol_type = genomic DNA
agggatacttaaccaaaagctgg

SEQ ID NO: 2184 - DNA, 23 bp, Homo sapiens
  source 1..23: mol_type = genomic DNA
atataggagacgtaatatatggg

SEQ ID NO: 2185 - DNA, 23 bp, Homo sapiens
  source 1..23: mol_type = genomic DNA
ctcaggctatggaggagactggg

SEQ ID NO: 2186 - DNA, 23 bp, Homo sapiens
  source 1..23: mol_type = genomic DNA
aaaacaatggaactgggccgtgg

SEQ ID NO: 2187 - DNA, 23 bp, Homo sapiens
  source 1..23: mol_type = genomic DNA
ctaggccagataaggagccctgg

SEQ ID NO: 2188 - DNA, 23 bp, Homo sapiens
  source 1..23: mol_type = genomic DNA
tcaatcttagcaccagtgccagg

SEQ ID NO: 2189 - DNA, 23 bp, Homo sapiens
  source 1..23: mol_type = genomic DNA
tatagaatagctatatattgagg

SEQ ID NO: 2190 - DNA, 23 bp, Homo sapiens
  source 1..23: mol_type = genomic DNA
ggaagttaggaggagcaagctgg

SEQ ID NO: 2191 - DNA, 23 bp, Homo sapiens
  source 1..23: mol_type = genomic DNA
catcccctgcttattaggatagg

SEQ ID NO: 2192 - DNA, 23 bp, Homo sapiens
  source 1..23: mol_type = genomic DNA
cccattctctagacttgcatagg

SEQ ID NO: 2193 - DNA, 23 bp, Homo sapiens
  source 1..23: mol_type = genomic DNA
acactcatcatgggggaggaggg

SEQ ID NO: 2194 - DNA, 23 bp, Homo sapiens
  source 1..23: mol_type = genomic DNA
gttctgccaggtttatgtacggg

SEQ ID NO: 2195 - DNA, 23 bp, Homo sapiens
  source 1..23: mol_type = genomic DNA
tattacaataataaattcaaggg

SEQ ID NO: 2196 - DNA, 23 bp, Homo sapiens
  source 1..23: mol_type = genomic DNA
cactgtcccttaaagctgatcgg

SEQ ID NO: 2197 - DNA, 23 bp, Homo sapiens
  source 1..23: mol_type = genomic DNA
cgagcctcattcttttgtagtgg

SEQ ID NO: 2198 - DNA, 23 bp, Homo sapiens
  source 1..23: mol_type = genomic DNA
aacttccgtaacaatctttgggg

SEQ ID NO: 2199 - DNA, 23 bp, Homo sapiens
  source 1..23: mol_type = genomic DNA
tctccccgatgccttaatctggg

SEQ ID NO: 2200 - DNA, 23 bp, Homo sapiens
  source 1..23: mol_type = genomic DNA
ttaaagaaagaaattaggaaagg

SEQ ID NO: 2201 - DNA, 23 bp, Homo sapiens
  source 1..23: mol_type = genomic DNA
ggaaatgaattggtgacagaagg

SEQ ID NO: 2202 - DNA, 23 bp, Homo sapiens
  source 1..23: mol_type = genomic DNA
attataagcatggaccgtgctgg

SEQ ID NO: 2203 - DNA, 23 bp, Homo sapiens
  source 1..23: mol_type = genomic DNA
aacaacttcagattagtgtaggg

SEQ ID NO: 2204 - DNA, 23 bp, Homo sapiens
  source 1..23: mol_type = genomic DNA
tctacttaaaaaggttaaggagg

SEQ ID NO: 2205 - DNA, 23 bp, Homo sapiens
  source 1..23: mol_type = genomic DNA
gctttctaccctaacaatagagg

SEQ ID NO: 2206 - DNA, 23 bp, Homo sapiens
  source 1..23: mol_type = genomic DNA
tctccttttgtcttttagtgggg

SEQ ID NO: 2207 - DNA, 23 bp, Homo sapiens
  source 1..23: mol_type = genomic DNA
gattctggctactgtttgagagg

SEQ ID NO: 2208 - DNA, 23 bp, Homo sapiens
  source 1..23: mol_type = genomic DNA
acagcagtcctcagtaactcagg

SEQ ID NO: 2209 - DNA, 23 bp, Homo sapiens
  source 1..23: mol_type = genomic DNA
cttaaaatgttaagtactgaggg

SEQ ID NO: 2210 - DNA, 23 bp, Homo sapiens
  source 1..23: mol_type = genomic DNA
tatgtttttaagagaagcaacgg

SEQ ID NO: 2211 - DNA, 23 bp, Homo sapiens
  source 1..23: mol_type = genomic DNA
gtagcaatatttcagttccaagg

SEQ ID NO: 2212 - DNA, 23 bp, Homo sapiens
  source 1..23: mol_type = genomic DNA
gtttgtgccactttaaacactgg

SEQ ID NO: 2213 - DNA, 23 bp, Homo sapiens
  source 1..23: mol_type = genomic DNA
aggaacaacagagcattcaatgg

SEQ ID NO: 2214 - DNA, 23 bp, Homo sapiens
  source 1..23: mol_type = genomic DNA
cctaccatttcagtcttggatgg

SEQ ID NO: 2215 - DNA, 23 bp, Homo sapiens
  source 1..23: mol_type = genomic DNA
tattacactttgttgtccgcagg

SEQ ID NO: 2216 - DNA, 23 bp, Homo sapiens
  source 1..23: mol_type = genomic DNA
tgagattcatctcctggcactgg

SEQ ID NO: 2217 - DNA, 23 bp, Homo sapiens
  source 1..23: mol_type = genomic DNA
cgttacaggatactgtaaaaggg

SEQ ID NO: 2218 - DNA, 23 bp, Homo sapiens
  source 1..23: mol_type = genomic DNA
gagtcatccaaatatatcccagg

SEQ ID NO: 2219 - DNA, 23 bp, Homo sapiens
  source 1..23: mol_type = genomic DNA
caggtagattgagccggtgaggg

SEQ ID NO: 2220 - DNA, 23 bp, Homo sapiens
  source 1..23: mol_type = genomic DNA
tcccagtgagtctaacagccagg

SEQ ID NO: 2221 - DNA, 23 bp, Homo sapiens
  source 1..23: mol_type = genomic DNA
accaatctaaacatttcctaagg

SEQ ID NO: 2222 - DNA, 23 bp, Homo sapiens
  source 1..23: mol_type = genomic DNA
acttgaggccatgaaattgaggg

SEQ ID NO: 2223 - DNA, 23 bp, Homo sapiens
  source 1..23: mol_type = genomic DNA
tcactgtctaagctagtactagg

SEQ ID NO: 2224 - DNA, 23 bp, Homo sapiens
  source 1..23: mol_type = genomic DNA
atttatttagtgcccggaagggg

SEQ ID NO: 2225 - DNA, 23 bp, Homo sapiens
  source 1..23: mol_type = genomic DNA
cttggaattcctatgccagcagg

SEQ ID NO: 2226 - DNA, 23 bp, Homo sapiens
  source 1..23: mol_type = genomic DNA
cagctagtttttttttcaggggg

SEQ ID NO: 2227 - DNA, 23 bp, Homo sapiens
  source 1..23: mol_type = genomic DNA
agcgttttctcgtgttcaagagg

SEQ ID NO: 2228 - DNA, 23 bp, Homo sapiens
  source 1..23: mol_type = genomic DNA
cattagtcatggagtcctaaggg

SEQ ID NO: 2229 - DNA, 23 bp, Homo sapiens
  source 1..23: mol_type = genomic DNA
cagaaacgctctttcaatggtgg

SEQ ID NO: 2230 - DNA, 23 bp, Homo sapiens
  source 1..23: mol_type = genomic DNA
aaatatattacaacttcccgtgg

SEQ ID NO: 2231 - DNA, 23 bp, Homo sapiens
  source 1..23: mol_type = genomic DNA
tgatgttatctatttagtacggg

SEQ ID NO: 2232 - DNA, 23 bp, Homo sapiens
  source 1..23: mol_type = genomic DNA
attgctaagcatgccctgtaggg

SEQ ID NO: 2233 - DNA, 23 bp, Homo sapiens
  source 1..23: mol_type = genomic DNA
gggtgatagtcgccagagaaggg

SEQ ID NO: 2234 - DNA, 23 bp, Homo sapiens
  source 1..23: mol_type = genomic DNA
tccaaatgatcaattttccatgg

SEQ ID NO: 2235 - DNA, 23 bp, Homo sapiens
  source 1..23: mol_type = genomic DNA
gggtagatacattttatgagtgg

SEQ ID NO: 2236 - DNA, 23 bp, Homo sapiens
  source 1..23: mol_type = genomic DNA
tatggtgtgccacttggaaaggg

SEQ ID NO: 2237 - DNA, 23 bp, Homo sapiens
  source 1..23: mol_type = genomic DNA
cattttatagaagttgaacatgg

SEQ ID NO: 2238 - DNA, 23 bp, Homo sapiens
  source 1..23: mol_type = genomic DNA
ttatctcaaggaataaatagagg

SEQ ID NO: 2239 - DNA, 23 bp, Homo sapiens
  source 1..23: mol_type = genomic DNA
agaatgggaggataataggatgg

SEQ ID NO: 2240 - DNA, 23 bp, Homo sapiens
  source 1..23: mol_type = genomic DNA
tgtataagtatgtttggcagtgg

SEQ ID NO: 2241 - DNA, 23 bp, Homo sapiens
  source 1..23: mol_type = genomic DNA
gatgcacattgatttaacttcgg

SEQ ID NO: 2242 - DNA, 23 bp, Homo sapiens
  source 1..23: mol_type = genomic DNA
gatttcaaacagaaaccagcagg

SEQ ID NO: 2243 - DNA, 23 bp, Homo sapiens
  source 1..23: mol_type = genomic DNA
gcaaggaaattacagacgttagg

SEQ ID NO: 2244 - DNA, 23 bp, Homo sapiens
  source 1..23: mol_type = genomic DNA
atttcgttgacccttaactaggg

SEQ ID NO: 2245 - DNA, 23 bp, Homo sapiens
  source 1..23: mol_type = genomic DNA
cagctgtgtaacataaaagctgg

SEQ ID NO: 2246 - DNA, 23 bp, Homo sapiens
  source 1..23: mol_type = genomic DNA
ctcatttgcatggctctacgtgg

SEQ ID NO: 2247 - DNA, 23 bp, Homo sapiens
  source 1..23: mol_type = genomic DNA
acattgactgtaaagcgaatggg

SEQ ID NO: 2248 - DNA, 23 bp, Homo sapiens
  source 1..23: mol_type = genomic DNA
ccttgtctgtgttacagcaatgg

SEQ ID NO: 2249 - DNA, 23 bp, Homo sapiens
  source 1..23: mol_type = genomic DNA
ataagctcttggttttctgaagg

SEQ ID NO: 2250 - DNA, 23 bp, Homo sapiens
  source 1..23: mol_type = genomic DNA
aagctgtatagaatttaaagtgg

SEQ ID NO: 2251 - DNA, 23 bp, Homo sapiens
  source 1..23: mol_type = genomic DNA
ttttaatgtgactcaatacatgg

SEQ ID NO: 2252 - DNA, 23 bp, Homo sapiens
  source 1..23: mol_type = genomic DNA
tttagctctcaaaagcacattgg

SEQ ID NO: 2253 - DNA, 23 bp, Homo sapiens
  source 1..23: mol_type = genomic DNA
atataagaatgacatttactagg

SEQ ID NO: 2254 - DNA, 23 bp, Homo sapiens
  source 1..23: mol_type = genomic DNA
aatcttacgccttttagaagagg

SEQ ID NO: 2255 - DNA, 23 bp, Homo sapiens
  source 1..23: mol_type = genomic DNA
gagttgggacggataattgaagg

SEQ ID NO: 2256 - DNA, 23 bp, Homo sapiens
  source 1..23: mol_type = genomic DNA
tctcgcagttgaaggattcaggg

SEQ ID NO: 2257 - DNA, 23 bp, Homo sapiens
  source 1..23: mol_type = genomic DNA
gctcacagtcgcccctatgaggg

SEQ ID NO: 2258 - DNA, 23 bp, Homo sapiens
  source 1..23: mol_type = genomic DNA
ctatagccttgactcaccacagg

SEQ ID NO: 2259 - DNA, 23 bp, Homo sapiens
  source 1..23: mol_type = genomic DNA
atgcacagaaaataaaatgaagg

SEQ ID NO: 2260 - DNA, 23 bp, Homo sapiens
  source 1..23: mol_type = genomic DNA
ttattctgttctaggatgagagg

SEQ ID NO: 2261 - DNA, 23 bp, Homo sapiens
  source 1..23: mol_type = genomic DNA
gatccttcctctcataaatgagg

SEQ ID NO: 2262 - DNA, 23 bp, Homo sapiens
  source 1..23: mol_type = genomic DNA
tgtttgggatttcagttggaagg

SEQ ID NO: 2263 - DNA, 23 bp, Homo sapiens
  source 1..23: mol_type = genomic DNA
cccatgacaaaactttcagccgg

SEQ ID NO: 2264 - DNA, 23 bp, Homo sapiens
  source 1..23: mol_type = genomic DNA
cattcggttaattttcaaagagg

SEQ ID NO: 2265 - DNA, 23 bp, Homo sapiens
  source 1..23: mol_type = genomic DNA
atttctataatctattgccaagg

SEQ ID NO: 2266 - DNA, 23 bp, Homo sapiens
  source 1..23: mol_type = genomic DNA
ggtagcttactgctatttggagg

SEQ ID NO: 2267 - DNA, 23 bp, Homo sapiens
  source 1..23: mol_type = genomic DNA
gccgccctcgagctaggacatgg

SEQ ID NO: 2268 - DNA, 23 bp, Homo sapiens
  source 1..23: mol_type = genomic DNA
aacttttgattgaatcccaaggg

SEQ ID NO: 2269 - DNA, 23 bp, Homo sapiens
  source 1..23: mol_type = genomic DNA
agctttctcaataagagtaaagg

SEQ ID NO: 2270 - DNA, 23 bp, Homo sapiens
  source 1..23: mol_type = genomic DNA
tcagcgatactacctgggtatgg

SEQ ID NO: 2271 - DNA, 23 bp, Homo sapiens
  source 1..23: mol_type = genomic DNA
tttcatctctgtagatgaggtgg

SEQ ID NO: 2272 - DNA, 23 bp, Homo sapiens
  source 1..23: mol_type = genomic DNA
cctatagtgcatgcatgccaggg

SEQ ID NO: 2273 - DNA, 23 bp, Homo sapiens
  source 1..23: mol_type = genomic DNA
tataagtcagagggaggagatgg

SEQ ID NO: 2274 - DNA, 23 bp, Homo sapiens
  source 1..23: mol_type = genomic DNA
atactgcatggaactcgggtggg

SEQ ID NO: 2275 - DNA, 23 bp, Homo sapiens
  source 1..23: mol_type = genomic DNA
ttacatcctatacttggctgagg

SEQ ID NO: 2276 - DNA, 23 bp, Homo sapiens
  source 1..23: mol_type = genomic DNA
aatagtgtgggtcaactgaaggg

SEQ ID NO: 2277 - DNA, 23 bp, Homo sapiens
  source 1..23: mol_type = genomic DNA
atggaatcaggactataaaaggg

SEQ ID NO: 2278 - DNA, 23 bp, Homo sapiens
  source 1..23: mol_type = genomic DNA
tctgaaacacacaacttggatgg

SEQ ID NO: 2279 - DNA, 23 bp, Homo sapiens
  source 1..23: mol_type = genomic DNA
tcagattatctgcaacccactgg

SEQ ID NO: 2280 - DNA, 23 bp, Homo sapiens
  source 1..23: mol_type = genomic DNA
tgcaaatgatagactcaagaagg

SEQ ID NO: 2281 - DNA, 23 bp, Homo sapiens
  source 1..23: mol_type = genomic DNA
tgtcttcttgttaagcgaagtgg

SEQ ID NO: 2282 - DNA, 23 bp, Homo sapiens
  source 1..23: mol_type = genomic DNA
gtgcaatgcccagagccataagg

SEQ ID NO: 2283 - DNA, 23 bp, Homo sapiens
  source 1..23: mol_type = genomic DNA
atgttctgaaagaacacaaaagg

SEQ ID NO: 2284 - DNA, 23 bp, Homo sapiens
  source 1..23: mol_type = genomic DNA
atactattctgaatagtacttgg

SEQ ID NO: 2285 - DNA, 23 bp, Homo sapiens
  source 1..23: mol_type = genomic DNA
tttgtaatacaaattacgatggg

SEQ ID NO: 2286 - DNA, 23 bp, Homo sapiens
  source 1..23: mol_type = genomic DNA
atttcagtagacttacagaaagg

SEQ ID NO: 2287 - DNA, 23 bp, Homo sapiens
  source 1..23: mol_type = genomic DNA
atattgagtaggcagctgtatgg

SEQ ID NO: 2288 - DNA, 23 bp, Homo sapiens
  source 1..23: mol_type = genomic DNA
aaatgcagctggagtgagtaggg

SEQ ID NO: 2289 - DNA, 23 bp, Homo sapiens
  source 1..23: mol_type = genomic DNA
gagcaatgagtatgtaggaaggg

SEQ ID NO: 2290 - DNA, 23 bp, Homo sapiens
  source 1..23: mol_type = genomic DNA
ccataaccaaatgggatgaaagg

SEQ ID NO: 2291 - DNA, 23 bp, Homo sapiens
  source 1..23: mol_type = genomic DNA
tgcagggtctggggattctgggg

SEQ ID NO: 2292 - DNA, 23 bp, Homo sapiens
  source 1..23: mol_type = genomic DNA
cctgtaactggagacaagaaggg

SEQ ID NO: 2293 - DNA, 23 bp, Homo sapiens
  source 1..23: mol_type = genomic DNA
agtctacctggattattgatggg

SEQ ID NO: 2294 - DNA, 23 bp, Homo sapiens
  source 1..23: mol_type = genomic DNA
cgtttttattaaatgcaaccagg

SEQ ID NO: 2295 - DNA, 23 bp, Homo sapiens
  source 1..23: mol_type = genomic DNA
agtttggagctccattttcaggg

SEQ ID NO: 2296 - DNA, 23 bp, Homo sapiens
  source 1..23: mol_type = genomic DNA
tatataaagtttcttggtgaggg

SEQ ID NO: 2297 - DNA, 23 bp, Homo sapiens
  source 1..23: mol_type = genomic DNA
atctactctgcatgaagctaggg

SEQ ID NO: 2298 - DNA, 23 bp, Homo sapiens
  source 1..23: mol_type = genomic DNA
gactggggaatataaagaaaggg

SEQ ID NO: 2299 - DNA, 23 bp, Homo sapiens
  source 1..23: mol_type = genomic DNA
gatccttaaagagaaaacttagg

SEQ ID NO: 2300 - DNA, 23 bp, Homo sapiens
  source 1..23: mol_type = genomic DNA
cagacctttgacacttacttcgg

SEQ ID NO: 2301 - DNA, 23 bp, Homo sapiens
  source 1..23: mol_type = genomic DNA
caggccatcaaacacccataagg

SEQ ID NO: 2302 - DNA, 23 bp, Homo sapiens
  source 1..23: mol_type = genomic DNA
gaagatgtgagctataaaagagg

SEQ ID NO: 2303 - DNA, 23 bp, Homo sapiens
  source 1..23: mol_type = genomic DNA
caaatgatctttatgccctaggg

SEQ ID NO: 2304 - DNA, 23 bp, Homo sapiens
  source 1..23: mol_type = genomic DNA
tataaaccacacatcacgtatgg

SEQ ID NO: 2305 - DNA, 23 bp, Homo sapiens
  source 1..23: mol_type = genomic DNA
ggaagctcacattttttcgaagg

SEQ ID NO: 2306 - DNA, 23 bp, Homo sapiens
  source 1..23: mol_type = genomic DNA
atagagaattcatggccctcagg

SEQ ID NO: 2307 - DNA, 23 bp, Homo sapiens
  source 1..23: mol_type = genomic DNA
atattccaccttgaaaaagcagg

SEQ ID NO: 2308 - DNA, 23 bp, Homo sapiens
  source 1..23: mol_type = genomic DNA
tggaggccttatcaaacaccagg

SEQ ID NO: 2309 - DNA, 23 bp, Homo sapiens
  source 1..23: mol_type = genomic DNA
tttctgctcactggtagcgctgg

SEQ ID NO: 2310 - DNA, 23 bp, Homo sapiens
  source 1..23: mol_type = genomic DNA
actttcttttgctaagtaggagg

SEQ ID NO: 2311 - DNA, 23 bp, Homo sapiens
  source 1..23: mol_type = genomic DNA
gattctacttgtatcatgatggg

SEQ ID NO: 2312 - DNA, 23 bp, Homo sapiens
  source 1..23: mol_type = genomic DNA
atatttggcaattataagcatgg

SEQ ID NO: 2313 - DNA, 23 bp, Homo sapiens
  source 1..23: mol_type = genomic DNA
ttagagaccgatgagtgaaaggg

SEQ ID NO: 2314 - DNA, 23 bp, Homo sapiens
  source 1..23: mol_type = genomic DNA
gttctatctgaataaagccatgg

SEQ ID NO: 2315 - DNA, 23 bp, Homo sapiens
  source 1..23: mol_type = genomic DNA
gctttttcctttgagaactgtgg

SEQ ID NO: 2316 - DNA, 23 bp, Homo sapiens
  source 1..23: mol_type = genomic DNA
gatgtgttcaaaacattatgagg

SEQ ID NO: 2317 - DNA, 23 bp, Homo sapiens
  source 1..23: mol_type = genomic DNA
tcatgccaagttaaagtggttgg

SEQ ID NO: 2318 - DNA, 23 bp, Homo sapiens
  source 1..23: mol_type = genomic DNA
ctactctcaattttcagatgcgg

SEQ ID NO: 2319 - DNA, 23 bp, Homo sapiens
  source 1..23: mol_type = genomic DNA
attgtttccatctaaagtaaggg

SEQ ID NO: 2320 - DNA, 23 bp, Homo sapiens
  source 1..23: mol_type = genomic DNA
actgaaggacagcgagtgcatgg

SEQ ID NO: 2321 - DNA, 23 bp, Homo sapiens
  source 1..23: mol_type = genomic DNA
gaatgcttataaagagtggcagg

SEQ ID NO: 2322 - DNA, 23 bp, Homo sapiens
  source 1..23: mol_type = genomic DNA
tcctccctaataccagtgaaagg

SEQ ID NO: 2323 - DNA, 23 bp, Homo sapiens
  source 1..23: mol_type = genomic DNA
tgttttgcttgaaggaactcagg

SEQ ID NO: 2324 - DNA, 23 bp, Homo sapiens
  source 1..23: mol_type = genomic DNA
cattcctaagcatattaaagagg

SEQ ID NO: 2325 - DNA, 23 bp, Homo sapiens
  source 1..23: mol_type = genomic DNA
ccaagactgaatcatagaatggg

SEQ ID NO: 2326 - DNA, 23 bp, Homo sapiens
  source 1..23: mol_type = genomic DNA
tttaacataaggctttagactgg

SEQ ID NO: 2327 - DNA, 23 bp, Homo sapiens
  source 1..23: mol_type = genomic DNA
catggatgtctcttgtcatacgg

SEQ ID NO: 2328 - DNA, 23 bp, Homo sapiens
  source 1..23: mol_type = genomic DNA
atttcacctctaaattacactgg

SEQ ID NO: 2329 - DNA, 23 bp, Homo sapiens
  source 1..23: mol_type = genomic DNA
ggaaggagcagcagttctgtggg

SEQ ID NO: 2330 - DNA, 23 bp, Homo sapiens
  source 1..23: mol_type = genomic DNA
atataaaaggattcagtatgagg

SEQ ID NO: 2331 - DNA, 23 bp, Homo sapiens
  source 1..23: mol_type = genomic DNA
tttgaaaatgggtctgagaacgg

SEQ ID NO: 2332 - DNA, 23 bp, Homo sapiens
  source 1..23: mol_type = genomic DNA
tcaaagagtaccatataagcggg

SEQ ID NO: 2333 - DNA, 23 bp, Homo sapiens
  source 1..23: mol_type = genomic DNA
atgctttagaaacagacaaatgg

SEQ ID NO: 2334 - DNA, 23 bp, Homo sapiens
  source 1..23: mol_type = genomic DNA
tgcttagaaagattagttgaggg

SEQ ID NO: 2335 - DNA, 23 bp, Homo sapiens
  source 1..23: mol_type = genomic DNA
gagagggagagaaagagaagtgg

SEQ ID NO: 2336 - DNA, 23 bp, Homo sapiens
  source 1..23: mol_type = genomic DNA
tattaaagaaaacaaggtgtggg

SEQ ID NO: 2337 - DNA, 23 bp, Homo sapiens
  source 1..23: mol_type = genomic DNA
atattaagtatgtgtccaaaagg

SEQ ID NO: 2338 - DNA, 23 bp, Homo sapiens
  source 1..23: mol_type = genomic DNA
ggaacagaggcgtaaatagcagg

SEQ ID NO: 2339 - DNA, 23 bp, Homo sapiens
  source 1..23: mol_type = genomic DNA
acaatgtcgttcttgagggatgg

SEQ ID NO: 2340 - DNA, 23 bp, Homo sapiens
  source 1..23: mol_type = genomic DNA
tgctttattggaggatcacaggg

SEQ ID NO: 2341 - DNA, 23 bp, Homo sapiens
  source 1..23: mol_type = genomic DNA
tccttgtccatcccagtacaagg

SEQ ID NO: 2342 - DNA, 23 bp, Homo sapiens
  source 1..23: mol_type = genomic DNA
ttactgagaaagtgaatggttgg

SEQ ID NO: 2343 - DNA, 23 bp, Homo sapiens
  source 1..23: mol_type = genomic DNA
tctcagtgattctttcgcccagg

SEQ ID NO: 2344 - DNA, 23 bp, Homo sapiens
  source 1..23: mol_type = genomic DNA
cttatggattgtttgactggagg

SEQ ID NO: 2345 - DNA, 23 bp, Homo sapiens
  source 1..23: mol_type = genomic DNA
tctgacagcccattagagacggg

SEQ ID NO: 2346 - DNA, 23 bp, Homo sapiens
  source 1..23: mol_type = genomic DNA
gttgaagtgggcatgtggaaggg

SEQ ID NO: 2347 - DNA, 23 bp, Homo sapiens
  source 1..23: mol_type = genomic DNA
cctccaagctaaaaattcatggg

SEQ ID NO: 2348 - DNA, 23 bp, Homo sapiens
  source 1..23: mol_type = genomic DNA
ggcatcaatagctaattctaggg

SEQ ID NO: 2349 - DNA, 23 bp, Homo sapiens
  source 1..23: mol_type = genomic DNA
tcttttttcaaaattatgccggg

SEQ ID NO: 2350 - DNA, 23 bp, Homo sapiens
  source 1..23: mol_type = genomic DNA
aagaagcagaagaaacaaaccgg

SEQ ID NO: 2351 - DNA, 23 bp, Homo sapiens
  source 1..23: mol_type = genomic DNA
ttatatgttaacatgatcaaagg

SEQ ID NO: 2352 - DNA, 23 bp, Homo sapiens
  source 1..23: mol_type = genomic DNA
atattatcgattaggcctgttgg

SEQ ID NO: 2353 - DNA, 23 bp, Homo sapiens
  source 1..23: mol_type = genomic DNA
gacagtggaccacattgtatagg

SEQ ID NO: 2354 - DNA, 23 bp, Homo sapiens
  source 1..23: mol_type = genomic DNA
aatttgcagccttttgtagaggg

SEQ ID NO: 2355 - DNA, 23 bp, Homo sapiens
  source 1..23: mol_type = genomic DNA
aactcattagaaaactaatgagg

SEQ ID NO: 2356 - DNA, 23 bp, Homo sapiens
  source 1..23: mol_type = genomic DNA
tggctctggagattttatagagg

SEQ ID NO: 2357 - DNA, 23 bp, Homo sapiens
  source 1..23: mol_type = genomic DNA
ccatgctgcacagtacaattggg

SEQ ID NO: 2358 - DNA, 23 bp, Homo sapiens
  source 1..23: mol_type = genomic DNA
ttagagttctcagtaaatgtagg

SEQ ID NO: 2359 - DNA, 23 bp, Homo sapiens
  source 1..23: mol_type = genomic DNA
gcataattacattatttaagggg

SEQ ID NO: 2360 - DNA, 23 bp, Homo sapiens
  source 1..23: mol_type = genomic DNA
gaggccattgaacaatttgaggg

SEQ ID NO: 2361 - DNA, 23 bp, Homo sapiens
  source 1..23: mol_type = genomic DNA
gattcaaatggcacaacagaagg

SEQ ID NO: 2362 - DNA, 23 bp, Homo sapiens
  source 1..23: mol_type = genomic DNA
tttcacatagtggttggtgatgg

SEQ ID NO: 2363 - DNA, 23 bp, Homo sapiens
  source 1..23: mol_type = genomic DNA
acatgcatattttactgccatgg

SEQ ID NO: 2364 - DNA, 23 bp, Homo sapiens
  source 1..23: mol_type = genomic DNA
ttctgattcccattctctgaggg

SEQ ID NO: 2365 - DNA, 23 bp, Homo sapiens
  source 1..23: mol_type = genomic DNA
attctactattaagtaatgaagg

SEQ ID NO: 2366 - DNA, 23 bp, Homo sapiens
  source 1..23: mol_type = genomic DNA
ttagtaaaacttatttgcgcggg

SEQ ID NO: 2367 - DNA, 23 bp, Homo sapiens
  source 1..23: mol_type = genomic DNA
atttctgccattaatactgtagg

SEQ ID NO: 2368 - DNA, 23 bp, Homo sapiens
  source 1..23: mol_type = genomic DNA
gacgtacataaactaccaatggg

SEQ ID NO: 2369 - DNA, 23 bp, Homo sapiens
  source 1..23: mol_type = genomic DNA
ggtattacagaagcattgtaagg

SEQ ID NO: 2370 - DNA, 23 bp, Homo sapiens
  source 1..23: mol_type = genomic DNA
ctgcttttagaaagtaagcccgg

SEQ ID NO: 2371 - DNA, 23 bp, Homo sapiens
  source 1..23: mol_type = genomic DNA
tcttcttaagcagctagtatggg

SEQ ID NO: 2372 - DNA, 23 bp, Homo sapiens
  source 1..23: mol_type = genomic DNA
taaaacggcatgaaaggaaaggg

SEQ ID NO: 2373 - DNA, 23 bp, Homo sapiens
  source 1..23: mol_type = genomic DNA
gttttatgttgggtacaggttgg

SEQ ID NO: 2374 - DNA, 23 bp, Homo sapiens
  source 1..23: mol_type = genomic DNA
attctgcctaaagttctgccagg

SEQ ID NO: 2375 - DNA, 23 bp, Homo sapiens
  source 1..23: mol_type = genomic DNA
attggcagtgacagcggaggagg

SEQ ID NO: 2376 - DNA, 23 bp, Homo sapiens
  source 1..23: mol_type = genomic DNA
tcttggttttctgaaggctaggg

SEQ ID NO: 2377 - DNA, 23 bp, Homo sapiens
  source 1..23: mol_type = genomic DNA
gaaaatattacaatagaaggtgg

SEQ ID NO: 2378 - DNA, 23 bp, Homo sapiens
  source 1..23: mol_type = genomic DNA
tattgtgaaggagcaaataccgg

SEQ ID NO: 2379 - DNA, 23 bp, Homo sapiens
  source 1..23: mol_type = genomic DNA
cctctctcatggacagtcagagg

SEQ ID NO: 2380 - DNA, 23 bp, Homo sapiens
  source 1..23: mol_type = genomic DNA
gagcaggactgtctagactttgg

SEQ ID NO: 2381 - DNA, 23 bp, Homo sapiens
  source 1..23: mol_type = genomic DNA
gtccgaaaagagcaaagggctgg

SEQ ID NO: 2382 - DNA, 23 bp, Homo sapiens
  source 1..23: mol_type = genomic DNA
gcataaattctgtgattaagtgg

SEQ ID NO: 2383 - DNA, 23 bp, Homo sapiens
  source 1..23: mol_type = genomic DNA
agactgagactgtatctacttgg

SEQ ID NO: 2384 - DNA, 23 bp, Homo sapiens
  source 1..23: mol_type = genomic DNA
tattctgcctccaggatttgggg

SEQ ID NO: 2385 - DNA, 23 bp, Homo sapiens
  source 1..23: mol_type = genomic DNA
ggggcttttgttgtgaggaaggg

SEQ ID NO: 2386 - DNA, 23 bp, Homo sapiens
  source 1..23: mol_type = genomic DNA
gttaggctcctgctgagagttgg

SEQ ID NO: 2387 - DNA, 23 bp, Homo sapiens
  source 1..23: mol_type = genomic DNA
atctccaacaacggaaaagaggg

SEQ ID NO: 2388 - DNA, 23 bp, Homo sapiens
  source 1..23: mol_type = genomic DNA
gattgataaatgagagtcctggg

SEQ ID NO: 2389 - DNA, 23 bp, Homo sapiens
  source 1..23: mol_type = genomic DNA
aactacattgtgaagcctgatgg

SEQ ID NO: 2390 - DNA, 23 bp, Homo sapiens
  source 1..23: mol_type = genomic DNA
cacataacctcccatttctaggg

SEQ ID NO: 2391 - DNA, 23 bp, Homo sapiens
  source 1..23: mol_type = genomic DNA
ttagaacttcttgaacaagttgg

SEQ ID NO: 2392 - DNA, 23 bp, Homo sapiens
  source 1..23: mol_type = genomic DNA
aaatacttgggaatttcagtagg

SEQ ID NO: 2393 - DNA, 23 bp, Homo sapiens
  source 1..23: mol_type = genomic DNA
aagataatcagagtcacaaaagg

SEQ ID NO: 2394 - DNA, 23 bp, Homo sapiens
  source 1..23: mol_type = genomic DNA
ttaatatgtaactcatggcttgg

SEQ ID NO: 2395 - DNA, 23 bp, Homo sapiens
  source 1..23: mol_type = genomic DNA
taacacctgagtttttaaagtgg

SEQ ID NO: 2396 - DNA, 23 bp, Homo sapiens
  source 1..23: mol_type = genomic DNA
tgagctgttacaaaagtggttgg

SEQ ID NO: 2397 - DNA, 23 bp, Homo sapiens
  source 1..23: mol_type = genomic DNA
gtattccactttaaaaactcagg

SEQ ID NO: 2398 - DNA, 23 bp, Homo sapiens
  source 1..23: mol_type = genomic DNA
gttcatcaaaatactcgtgttgg

SEQ ID NO: 2399 - DNA, 23 bp, Homo sapiens
  source 1..23: mol_type = genomic DNA
taatgaaatgagaatgtagatgg

SEQ ID NO: 2400 - DNA, 23 bp, Homo sapiens
  source 1..23: mol_type = genomic DNA
tctagaacagcatttccaaatgg

SEQ ID NO: 2401 - DNA, 23 bp, Homo sapiens
  source 1..23: mol_type = genomic DNA
gcaagaccaagattatcatctgg

SEQ ID NO: 2402 - DNA, 23 bp, Homo sapiens
  source 1..23: mol_type = genomic DNA
gcaggtacagaagtagatcatgg

SEQ ID NO: 2403 - DNA, 23 bp, Homo sapiens
  source 1..23: mol_type = genomic DNA
gacagtggtgagttttagtaggg

SEQ ID NO: 2404 - DNA, 23 bp, Homo sapiens
  source 1..23: mol_type = genomic DNA
ctcatatagtttaaaacacacgg

SEQ ID NO: 2405 - DNA, 23 bp, Homo sapiens
  source 1..23: mol_type = genomic DNA
ttttattcagtagatatcactgg

SEQ ID NO: 2406 - DNA, 23 bp, Homo sapiens
  source 1..23: mol_type = genomic DNA
aagcagcgcctctattgttaggg

SEQ ID NO: 2407 - DNA, 23 bp, Homo sapiens
  source 1..23: mol_type = genomic DNA
attacagtatattctacagttgg

SEQ ID NO: 2408 - DNA, 23 bp, Homo sapiens
  source 1..23: mol_type = genomic DNA
cttttccattgctaccaaagagg

SEQ ID NO: 2409 - DNA, 23 bp, Homo sapiens
  source 1..23: mol_type = genomic DNA
gctgaatttacctatttggtagg

SEQ ID NO: 2410 - DNA, 23 bp, Homo sapiens
  source 1..23: mol_type = genomic DNA
atattgcagcaacattatgaagg

SEQ ID NO: 2411 - DNA, 23 bp, Homo sapiens
  source 1..23: mol_type = genomic DNA
ctataaactttaagggagcaggg

SEQ ID NO: 2412 - DNA, 23 bp, Homo sapiens
  source 1..23: mol_type = genomic DNA
accttcggagaaaaacgaatagg

SEQ ID NO: 2413 - DNA, 23 bp, Homo sapiens
  source 1..23: mol_type = genomic DNA
acatttcctcttgataaatgagg

SEQ ID NO: 2414 - DNA, 23 bp, Homo sapiens
  source 1..23: mol_type = genomic DNA
aagatttccagtctgaaaagagg

SEQ ID NO: 2415 - DNA, 23 bp, Homo sapiens
  source 1..23: mol_type = genomic DNA
gagaaaggatgttttagctgtgg

SEQ ID NO: 2416 - DNA, 23 bp, Homo sapiens
  source 1..23: mol_type = genomic DNA
atcccatattcctattacccagg

SEQ ID NO: 2417 - DNA, 23 bp, Homo sapiens
  source 1..23: mol_type = genomic DNA
ataatcttggtcttgcctgccgg

SEQ ID NO: 2418 - DNA, 23 bp, Homo sapiens
  source 1..23: mol_type = genomic DNA
ggaaaaatacttggccagatggg

SEQ ID NO: 2419 - DNA, 23 bp, Homo sapiens
  source 1..23: mol_type = genomic DNA
ataaatatgaaaaccatacatgg

SEQ ID NO: 2420 - DNA, 23 bp, Homo sapiens
  source 1..23: mol_type = genomic DNA
gtctggttaaggaacactattgg

SEQ ID NO: 2421 - DNA, 23 bp, Homo sapiens
  source 1..23: mol_type = genomic DNA
aatatcaaccgtcttctcactgg

SEQ ID NO: 2422 - DNA, 23 bp, Homo sapiens
  source 1..23: mol_type = genomic DNA
tgctagaaatttgtgagcaaagg

SEQ ID NO: 2423 - DNA, 23 bp, Homo sapiens
  source 1..23: mol_type = genomic DNA
attctgagcatgcccagtggtgg

SEQ ID NO: 2424 - DNA, 23 bp, Homo sapiens
  source 1..23: mol_type = genomic DNA
cagattactgagaaagtgaatgg

SEQ ID NO: 2425 - DNA, 23 bp, Homo sapiens
  source 1..23: mol_type = genomic DNA
tttaattatacagctaccctggg

SEQ ID NO: 2426 - DNA, 23 bp, Homo sapiens
  source 1..23: mol_type = genomic DNA
ctaattatactcatgctacaagg

SEQ ID NO: 2427 - DNA, 23 bp, Homo sapiens
  source 1..23: mol_type = genomic DNA
gatgccacctaatctccatcagg

SEQ ID NO: 2428 - DNA, 23 bp, Homo sapiens
  source 1..23: mol_type = genomic DNA
ctctgacagcccattagagacgg

SEQ ID NO: 2429 - DNA, 23 bp, Homo sapiens
  source 1..23: mol_type = genomic DNA
tatgaaaaaaaaataggataggg

SEQ ID NO: 2430 - DNA, 23 bp, Homo sapiens
  source 1..23: mol_type = genomic DNA
cagtatgggaaatcaaaaaaggg

SEQ ID NO: 2431 - DNA, 23 bp, Homo sapiens
  source 1..23: mol_type = genomic DNA
tcagtgagtttattaggctgagg

SEQ ID NO: 2432 - DNA, 23 bp, Homo sapiens
  source 1..23: mol_type = genomic DNA
tagctaagtattaggaagggtgg

SEQ ID NO: 2433 - DNA, 23 bp, Homo sapiens
  source 1..23: mol_type = genomic DNA
tgtttcacatttaagagggaagg

SEQ ID NO: 2434 - DNA, 23 bp, Homo sapiens
  source 1..23: mol_type = genomic DNA
tgctgtatgcctgctggcatagg

SEQ ID NO: 2435 - DNA, 23 bp, Homo sapiens
  source 1..23: mol_type = genomic DNA
ataatttagtgcaaaggtgtagg

SEQ ID NO: 2436 - DNA, 23 bp, Homo sapiens
  source 1..23: mol_type = genomic DNA
aattgagtggtgcacgtcgaggg

SEQ ID NO: 2437 - DNA, 23 bp, Homo sapiens
  source 1..23: mol_type = genomic DNA
actttaaagtcgttgtgaagtgg

SEQ ID NO: 2438 - DNA, 23 bp, Homo sapiens
  source 1..23: mol_type = genomic DNA
aggagtttagtgatatcagttgg

SEQ ID NO: 2439 - DNA, 23 bp, Homo sapiens
  source 1..23: mol_type = genomic DNA
ccatcattcccatggcctgtagg

SEQ ID NO: 2440 - DNA, 23 bp, Homo sapiens
  source 1..23: mol_type = genomic DNA
tcggtccagcaacaataagctgg

SEQ ID NO: 2441 - DNA, 23 bp, Homo sapiens
  source 1..23: mol_type = genomic DNA
gctcattacattctatattgtgg

SEQ ID NO: 2442 - DNA, 23 bp, Homo sapiens
  source 1..23: mol_type = genomic DNA
gctaattaatggggacccatggg

SEQ ID NO: 2443 - DNA, 23 bp, Homo sapiens
  source 1..23: mol_type = genomic DNA
tatttgatgccgtatgtgctcgg

SEQ ID NO: 2444 - DNA, 23 bp, Homo sapiens
  source 1..23: mol_type = genomic DNA
ggtctattcattcaggctaaggg

SEQ ID NO: 2445 - DNA, 23 bp, Homo sapiens
  source 1..23: mol_type = genomic DNA
tatatgtttagcctagaggcagg

SEQ ID NO: 2446 - DNA, 23 bp, Homo sapiens
  source 1..23: mol_type = genomic DNA
gttttctcttccgctaaactggg

SEQ ID NO: 2447 - DNA, 23 bp, Homo sapiens
  source 1..23: mol_type = genomic DNA
agtatgagcatgcaacggttagg

SEQ ID NO: 2448 - DNA, 23 bp, Homo sapiens
  source 1..23: mol_type = genomic DNA
cccttaaagctgatcggcaaagg

SEQ ID NO: 2449 - DNA, 23 bp, Homo sapiens
  source 1..23: mol_type = genomic DNA
cgttgcacacgtcctcaactagg

SEQ ID NO: 2450 - DNA, 23 bp, Homo sapiens
  source 1..23: mol_type = genomic DNA
ccagggtggaaaataagcttagg

SEQ ID NO: 2451 - DNA, 23 bp, Homo sapiens
  source 1..23: mol_type = genomic DNA
tcagttttatagtcttcagtggg

SEQ ID NO: 2452 - DNA, 23 bp, Homo sapiens
  source 1..23: mol_type = genomic DNA
ttgagagtaaaatttgagcatgg

SEQ ID NO: 2453 - DNA, 23 bp, Homo sapiens
  source 1..23: mol_type = genomic DNA
gccatttgccaagtgccaaatgg

SEQ ID NO: 2454 - DNA, 23 bp, Homo sapiens
  source 1..23: mol_type = genomic DNA
atacagggtatataatttgaagg

SEQ ID NO: 2455 - DNA, 23 bp, Homo sapiens
  source 1..23: mol_type = genomic DNA
cattgtgggattcctccctatgg

SEQ ID NO: 2456 - DNA, 23 bp, Homo sapiens
  source 1..23: mol_type = genomic DNA
taaaaagtggagcttgcaaaggg

SEQ ID NO: 2457 - DNA, 23 bp, Homo sapiens
  source 1..23: mol_type = genomic DNA
tttcttgttcatctattgtgagg

SEQ ID NO: 2458 - DNA, 23 bp, Homo sapiens
  source 1..23: mol_type = genomic DNA
gcttttggctaagactgtcatgg

SEQ ID NO: 2459 - DNA, 23 bp, Homo sapiens
  source 1..23: mol_type = genomic DNA
ttgtagccatgataaacaaatgg

SEQ ID NO: 2460 - DNA, 23 bp, Homo sapiens
  source 1..23: mol_type = genomic DNA
tttacatttcattctttaggggg

SEQ ID NO: 2461 - DNA, 23 bp, Homo sapiens
  source 1..23: mol_type = genomic DNA
gaaccattagtacttacaatggg

SEQ ID NO: 2462 - DNA, 23 bp, Homo sapiens
  source 1..23: mol_type = genomic DNA
tttcaaaattggctattctgtgg

SEQ ID NO: 2463 - DNA, 23 bp, Homo sapiens
  source 1..23: mol_type = genomic DNA
agatgtattgatttctccaaggg

SEQ ID NO: 2464 - DNA, 23 bp, Homo sapiens
  source 1..23: mol_type = genomic DNA
gttttctctttaaggatctgtgg

SEQ ID NO: 2465 - DNA, 23 bp, Homo sapiens
  source 1..23: mol_type = genomic DNA
cctctgagccctcaaggtggagg

SEQ ID NO: 2466 - DNA, 23 bp, Homo sapiens
  source 1..23: mol_type = genomic DNA
ttatgcaaagctcctattgtggg

SEQ ID NO: 2467 - DNA, 23 bp, Homo sapiens
  source 1..23: mol_type = genomic DNA
cctatgcaagtctagagaatggg

SEQ ID NO: 2468 - DNA, 23 bp, Homo sapiens
  source 1..23: mol_type = genomic DNA
cattttatactaactatgggtgg

SEQ ID NO: 2469 - DNA, 23 bp, Homo sapiens
  source 1..23: mol_type = genomic DNA
gcacccatgtcaatatgatcagg

SEQ ID NO: 2470 - DNA, 23 bp, Homo sapiens
  source 1..23: mol_type = genomic DNA
actaatagatgttttacgtaggg

SEQ ID NO: 2471 - DNA, 23 bp, Homo sapiens
  source 1..23: mol_type = genomic DNA
tgaaaacctggaaaaactaaagg

SEQ ID NO: 2472 - DNA, 23 bp, Homo sapiens
  source 1..23: mol_type = genomic DNA
ggaaataacagacaaaagaaagg

SEQ ID NO: 2473 - DNA, 23 bp, Homo sapiens
  source 1..23: mol_type = genomic DNA
agacagattttaggttaaagggg

SEQ ID NO: 2474 - DNA, 23 bp, Homo sapiens
  source 1..23: mol_type = genomic DNA
tttcattaataatcaacagctgg

SEQ ID NO: 2475 - DNA, 23 bp, Homo sapiens
  source 1..23: mol_type = genomic DNA
gaggccagacttgcagggcaggg

SEQ ID NO: 2476 - DNA, 23 bp, Homo sapiens
  source 1..23: mol_type = genomic DNA
tactgcatggaactcgggtgggg

SEQ ID NO: 2477 - DNA, 23 bp, Homo sapiens
  source 1..23: mol_type = genomic DNA
aattcagcctggtattactctgg

SEQ ID NO: 2478 - DNA, 23 bp, Homo sapiens
  source 1..23: mol_type = genomic DNA
ctttcactgtggtaactggaagg

SEQ ID NO: 2479 - DNA, 23 bp, Homo sapiens
  source 1..23: mol_type = genomic DNA
tatcaagatacttgaaagcaggg

SEQ ID NO: 2480 - DNA, 23 bp, Homo sapiens
  source 1..23: mol_type = genomic DNA
ttgtgaactcctccaccttgagg

SEQ ID NO: 2481 - DNA, 23 bp, Homo sapiens
  source 1..23: mol_type = genomic DNA
ataattagcttatgatcagatgg

SEQ ID NO: 2482 - DNA, 23 bp, Homo sapiens
  source 1..23: mol_type = genomic DNA
ccacattgctggtaccgttgggg

SEQ ID NO: 2483 - DNA, 23 bp, Homo sapiens
  source 1..23: mol_type = genomic DNA
acatgtatttatttagtgcccgg

SEQ ID NO: 2484 - DNA, 23 bp, Homo sapiens
  source 1..23: mol_type = genomic DNA
cttggaattgaaatggaagctgg

SEQ ID NO: 2485 - DNA, 23 bp, Homo sapiens
  source 1..23: mol_type = genomic DNA
acataatacaaacttcactttgg

SEQ ID NO: 2486 - DNA, 23 bp, Homo sapiens
  source 1..23: mol_type = genomic DNA
aaggtcctcttcatagcagcagg

SEQ ID NO: 2487 - DNA, 23 bp, Homo sapiens
  source 1..23: mol_type = genomic DNA
ttattgtctgctctctgtagtgg

SEQ ID NO: 2488 - DNA, 23 bp, Homo sapiens
  source 1..23: mol_type = genomic DNA
ctttctgctaccagtagaagtgg

SEQ ID NO: 2489 - DNA, 23 bp, Homo sapiens
  source 1..23: mol_type = genomic DNA
tttcagataattaggcagcctgg

SEQ ID NO: 2490 - DNA, 23 bp, Homo sapiens
  source 1..23: mol_type = genomic DNA
agaggggaaatataccctaatgg

SEQ ID NO: 2491 - DNA, 23 bp, Homo sapiens
  source 1..23: mol_type = genomic DNA
gatttcacaaattaaggagaagg

SEQ ID NO: 2492 - DNA, 23 bp, Homo sapiens
  source 1..23: mol_type = genomic DNA
tgcatattctattactgcagtgg

SEQ ID NO: 2493 - DNA, 23 bp, Homo sapiens
  source 1..23: mol_type = genomic DNA
gtagaaaactgtgtcattcgtgg

SEQ ID NO: 2494 - DNA, 23 bp, Homo sapiens
  source 1..23: mol_type = genomic DNA
ttatgggtgtaaagtgtaagtgg

SEQ ID NO: 2495 - DNA, 23 bp, Homo sapiens
  source 1..23: mol_type = genomic DNA
ctacgttgttaaaaatgggcagg

SEQ ID NO: 2496 - DNA, 23 bp, Homo sapiens
  source 1..23: mol_type = genomic DNA
tagagggaagaaggatgcaatgg

SEQ ID NO: 2497 - DNA, 23 bp, Homo sapiens
  source 1..23: mol_type = genomic DNA
attatcataattgaataagaagg

SEQ ID NO: 2498 - DNA, 23 bp, Homo sapiens
  source 1..23: mol_type = genomic DNA
tattttagatttgcttgtaacgg

SEQ ID NO: 2499 - DNA, 23 bp, Homo sapiens
  source 1..23: mol_type = genomic DNA
ttccaactctacacctccattgg

SEQ ID NO: 2500 - DNA, 23 bp, Homo sapiens
  source 1..23: mol_type = genomic DNA
tttgactttttatatttgaaggg

SEQ ID NO: 2501 - DNA, 23 bp, Homo sapiens
  source 1..23: mol_type = genomic DNA
ccagacagtaaagctgacttagg

SEQ ID NO: 2502 - DNA, 23 bp, Homo sapiens
  source 1..23: mol_type = genomic DNA
agccctggtgatttttagggtgg

SEQ ID NO: 2503 - DNA, 23 bp, Homo sapiens
  source 1..23: mol_type = genomic DNA
ctttgcttagctcttctggaggg

SEQ ID NO: 2504 - DNA, 23 bp, Homo sapiens
  source 1..23: mol_type = genomic DNA
tttaatttcagggttcatgaagg

SEQ ID NO: 2505 - DNA, 23 bp, Homo sapiens
  source 1..23: mol_type = genomic DNA
ttttagaataggttacaagtagg

SEQ ID NO: 2506 - DNA, 23 bp, Homo sapiens
  source 1..23: mol_type = genomic DNA
cagtagatcatgttatgtaaagg

SEQ ID NO: 2507 - DNA, 23 bp, Homo sapiens
  source 1..23: mol_type = genomic DNA
gagatattaccccagaaggctgg

SEQ ID NO: 2508 - DNA, 23 bp, Homo sapiens
  source 1..23: mol_type = genomic DNA
ggtcaaaatcaagatttggcagg

SEQ ID NO: 2509 - DNA, 23 bp, Homo sapiens
  source 1..23: mol_type = genomic DNA
atagagacttccaaaaagaatgg

SEQ ID NO: 2510 - DNA, 23 bp, Homo sapiens
  source 1..23: mol_type = genomic DNA
ccgccaatggaggttaggtatgg

SEQ ID NO: 2511 - DNA, 23 bp, Homo sapiens
  source 1..23: mol_type = genomic DNA
gccaaaagcagagtggaagaagg

SEQ ID NO: 2512 - DNA, 23 bp, Homo sapiens
  source 1..23: mol_type = genomic DNA
tgtcgttcttgagggatgggtgg

SEQ ID NO: 2513 - DNA, 23 bp, Homo sapiens
  source 1..23: mol_type = genomic DNA
agtgtcataccttccatcaaagg

SEQ ID NO: 2514 - DNA, 23 bp, Homo sapiens
  source 1..23: mol_type = genomic DNA
gacaataacgatgctcctatggg

SEQ ID NO: 2515 - DNA, 23 bp, Homo sapiens
  source 1..23: mol_type = genomic DNA
tgaggtaaccagccaggctacgg

SEQ ID NO: 2516 - DNA, 23 bp, Homo sapiens
  source 1..23: mol_type = genomic DNA
tgatttccatgaggaaagctggg

SEQ ID NO: 2517 - DNA, 23 bp, Homo sapiens
  source 1..23: mol_type = genomic DNA
tcaaaattagttccagaagaagg

SEQ ID NO: 2518 - DNA, 23 bp, Homo sapiens
  source 1..23: mol_type = genomic DNA
atcttcttaaacattttcgttgg

SEQ ID NO: 2519 - DNA, 23 bp, Homo sapiens
  source 1..23: mol_type = genomic DNA
gtaaaaaatgagagataggtggg

SEQ ID NO: 2520 - DNA, 23 bp, Homo sapiens
  source 1..23: mol_type = genomic DNA
tttatattacttgagggtggtgg

SEQ ID NO: 2521 - DNA, 23 bp, Homo sapiens
  source 1..23: mol_type = genomic DNA
gtattataactctttagcatagg

SEQ ID NO: 2522 - DNA, 23 bp, Homo sapiens
  source 1..23: mol_type = genomic DNA
tcctagcaaaaactcccaaatgg

SEQ ID NO: 2523 - DNA, 23 bp, Homo sapiens
  source 1..23: mol_type = genomic DNA
ttatgggcatgaaccagccttgg

SEQ ID NO: 2524 - DNA, 23 bp, Homo sapiens
  source 1..23: mol_type = genomic DNA
atagagggagataaaggaagggg

SEQ ID NO: 2525 - DNA, 23 bp, Homo sapiens
  source 1..23: mol_type = genomic DNA
gaagctttttcccttaaggatgg

SEQ ID NO: 2526 - DNA, 23 bp, Homo sapiens
  source 1..23: mol_type = genomic DNA
gttaataaatgaagaactaaggg

SEQ ID NO: 2527 - DNA, 23 bp, Homo sapiens
  source 1..23: mol_type = genomic DNA
ctcttcatttaaaaaagagaggg

SEQ ID NO: 2528 - DNA, 23 bp, Homo sapiens
  source 1..23: mol_type = genomic DNA
tgtttttattatgctagccatgg

SEQ ID NO: 2529 - DNA, 23 bp, Homo sapiens
  source 1..23: mol_type = genomic DNA
tttgctatgcaccggaccctggg

SEQ ID NO: 2530 - DNA, 23 bp, Homo sapiens
  source 1..23: mol_type = genomic DNA
aataatacccacatcagtagagg

SEQ ID NO: 2531 - DNA, 23 bp, Homo sapiens
  source 1..23: mol_type = genomic DNA
agaacacatcagaaaataagtgg

SEQ ID NO: 2532 - DNA, 23 bp, Homo sapiens
  source 1..23: mol_type = genomic DNA
ctattgttaaacatcaatagagg

SEQ ID NO: 2533 - DNA, 23 bp, Homo sapiens
  source 1..23: mol_type = genomic DNA
atttctgtaataaaaagtatggg

SEQ ID NO: 2534 - DNA, 23 bp, Homo sapiens
  source 1..23: mol_type = genomic DNA
gccaagactgaatcatagaatgg

SEQ ID NO: 2535 - DNA, 23 bp, Homo sapiens
  source 1..23: mol_type = genomic DNA
cacagaggctgagttttgactgg

SEQ ID NO: 2536 - DNA, 23 bp, Homo sapiens
  source 1..23: mol_type = genomic DNA
tttatatgcccttaaaacgctgg

SEQ ID NO: 2537 - DNA, 23 bp, Homo sapiens
  source 1..23: mol_type = genomic DNA
tgtgacccgactggttccctggg

SEQ ID NO: 2538 - DNA, 23 bp, Homo sapiens
  source 1..23: mol_type = genomic DNA
agtgtcagatatggaggttgtgg

SEQ ID NO: 2539 - DNA, 23 bp, Homo sapiens
  source 1..23: mol_type = genomic DNA
ttatcagcatcattcagctctgg

SEQ ID NO: 2540 - DNA, 23 bp, Homo sapiens
  source 1..23: mol_type = genomic DNA
actgaggctatacttctgtatgg

SEQ ID NO: 2541 - DNA, 23 bp, Homo sapiens
  source 1..23: mol_type = genomic DNA
agattataattgtttatagaggg

SEQ ID NO: 2542 - DNA, 23 bp, Homo sapiens
  source 1..23: mol_type = genomic DNA
tggcacagtaagcctttggatgg

SEQ ID NO: 2543 - DNA, 23 bp, Homo sapiens
  source 1..23: mol_type = genomic DNA
aggatgacaaaggtccttatggg

SEQ ID NO: 2544 - DNA, 23 bp, Homo sapiens
  source 1..23: mol_type = genomic DNA
ctagtcctccctgagaatgtagg

SEQ ID NO: 2545 - DNA, 23 bp, Homo sapiens
  source 1..23: mol_type = genomic DNA
aagagcctcctcgaggtgaatgg

SEQ ID NO: 2546 - DNA, 23 bp, Homo sapiens
  source 1..23: mol_type = genomic DNA
gagtattacacacaaaatagtgg

SEQ ID NO: 2547 - DNA, 23 bp, Homo sapiens
  source 1..23: mol_type = genomic DNA
atttacctcataaaacagttggg

SEQ ID NO: 2548 - DNA, 23 bp, Homo sapiens
  source 1..23: mol_type = genomic DNA
ttgttacatctaatactggttgg

SEQ ID NO: 2549 - DNA, 23 bp, Homo sapiens
  source 1..23: mol_type = genomic DNA
ctttaatcatgaaaacaaaaggg

SEQ ID NO: 2550 - DNA, 23 bp, Homo sapiens
  source 1..23: mol_type = genomic DNA
gttaatgtcctactaaagctagg

SEQ ID NO: 2551 - DNA, 23 bp, Homo sapiens
  source 1..23: mol_type = genomic DNA
ataccaccactgtactgtactgg

SEQ ID NO: 2552 - DNA, 23 bp, Homo sapiens
  source 1..23: mol_type = genomic DNA
acgtaagccacaattttacaagg

SEQ ID NO: 2553 - DNA, 23 bp, Homo sapiens
  source 1..23: mol_type = genomic DNA
ttcacctctctcaagaggcttgg

SEQ ID NO: 2554 - DNA, 23 bp, Homo sapiens
  source 1..23: mol_type = genomic DNA
tgattgcatatctttcccatagg

SEQ ID NO: 2555 - DNA, 23 bp, Homo sapiens
  source 1..23: mol_type = genomic DNA
gctcgattaggtttggtggttgg

SEQ ID NO: 2556 - DNA, 23 bp, Homo sapiens
  source 1..23: mol_type = genomic DNA
ataacttgagtgcttttcaaagg

SEQ ID NO: 2557 - DNA, 23 bp, Homo sapiens
  source 1..23: mol_type = genomic DNA
cttggataatctattagcattgg

SEQ ID NO: 2558 - DNA, 23 bp, Homo sapiens
  source 1..23: mol_type = genomic DNA
tttgcagagtttgaagagctcgg

SEQ ID NO: 2559 - DNA, 23 bp, Homo sapiens
  source 1..23: mol_type = genomic DNA
tctgtatatctgcctcctccagg

SEQ ID NO: 2560 - DNA, 23 bp, Homo sapiens
  source 1..23: mol_type = genomic DNA
tgaataccagacaaaaatacagg

SEQ ID NO: 2561 - DNA, 23 bp, Homo sapiens
  source 1..23: mol_type = genomic DNA
attgcataaccagttgtcactgg

SEQ ID NO: 2562 - DNA, 23 bp, Homo sapiens
  source 1..23: mol_type = genomic DNA
gcagcacaatgtatcaccttagg

SEQ ID NO: 2563 - DNA, 23 bp, Homo sapiens
  source 1..23: mol_type = genomic DNA
gtagtcatctttgtggtaggtgg

SEQ ID NO: 2564 - DNA, 23 bp, Homo sapiens
  source 1..23: mol_type = genomic DNA
ggattgtctaagtcattggctgg

SEQ ID NO: 2565 - DNA, 23 bp, Homo sapiens
  source 1..23: mol_type = genomic DNA
cagtgagagttggatagagaggg

SEQ ID NO: 2566 - DNA, 23 bp, Homo sapiens
  source 1..23: mol_type = genomic DNA
ttcttagtagcataccactatgg

SEQ ID NO: 2567 - DNA, 23 bp, Homo sapiens
  source 1..23: mol_type = genomic DNA
attacagccaatcacaatagtgg

SEQ ID NO: 2568 - DNA, 23 bp, Homo sapiens
  source 1..23: mol_type = genomic DNA
atagagagcaatgagtatgtagg

SEQ ID NO: 2569 - DNA, 23 bp, Homo sapiens
  source 1..23: mol_type = genomic DNA
ttaaggtgtttcttacctgatgg

SEQ ID NO: 2570 - DNA, 23 bp, Homo sapiens
  source 1..23: mol_type = genomic DNA
tgcatgacttgaagacactaggg

SEQ ID NO: 2571 - DNA, 23 bp, Homo sapiens
  source 1..23: mol_type = genomic DNA
gtgatcagtgaaatttacattgg

SEQ ID NO: 2572 - DNA, 23 bp, Homo sapiens
  source 1..23: mol_type = genomic DNA
aatctgtcagtatctctctctgg

SEQ ID NO: 2573 - DNA, 23 bp, Homo sapiens
  source 1..23: mol_type = genomic DNA
gattcggtaaatgccatttgagg

SEQ ID NO: 2574 - DNA, 23 bp, Homo sapiens
  source 1..23: mol_type = genomic DNA
cctcttcatttaaaaaagagagg

SEQ ID NO: 2575 - DNA, 23 bp, Homo sapiens
  source 1..23: mol_type = genomic DNA
ttggtcaatttgcaacccctggg

SEQ ID NO: 2576 - DNA, 23 bp, Homo sapiens
  source 1..23: mol_type = genomic DNA
gggaaggcaacttaagctaaagg

SEQ ID NO: 2577 - DNA, 23 bp, Homo sapiens
  source 1..23: mol_type = genomic DNA
atagactaaaactttacataggg

SEQ ID NO: 2578 - DNA, 23 bp, Homo sapiens
  source 1..23: mol_type = genomic DNA
ctaaaacccagctttcctcatgg

SEQ ID NO: 2579 - DNA, 23 bp, Homo sapiens
  source 1..23: mol_type = genomic DNA
cccagagcataagattgaagtgg

SEQ ID NO: 2580 - DNA, 23 bp, Homo sapiens
  source 1..23: mol_type = genomic DNA
ttgtagctgtgagtaaagtaagg

SEQ ID NO: 2581 - DNA, 23 bp, Homo sapiens
  source 1..23: mol_type = genomic DNA
tagtgcccaaccagagcaaaggg

SEQ ID NO: 2582 - DNA, 23 bp, Homo sapiens
  source 1..23: mol_type = genomic DNA
agaaatggtggcaaagagctagg

SEQ ID NO: 2583 - DNA, 23 bp, Homo sapiens
  source 1..23: mol_type = genomic DNA
attgttgtaaattttcctgaagg

SEQ ID NO: 2584 - DNA, 23 bp, Homo sapiens
  source 1..23: mol_type = genomic DNA
cttgggagagccccgaaagatgg

SEQ ID NO: 2585 - DNA, 23 bp, Homo sapiens
  source 1..23: mol_type = genomic DNA
taatctctagaggagccatctgg

SEQ ID NO: 2586 - DNA, 23 bp, Homo sapiens
  source 1..23: mol_type = genomic DNA
tataaaggtggaaaaatacttgg

SEQ ID NO: 2587 - DNA, 23 bp, Homo sapiens
  source 1..23: mol_type = genomic DNA
ttatagttagcaagatagcctgg

SEQ ID NO: 2588 - DNA, 23 bp, Homo sapiens
  source 1..23: mol_type = genomic DNA
tgctctctattatacaaagaagg

SEQ ID NO: 2589 - DNA, 23 bp, Homo sapiens
  source 1..23: mol_type = genomic DNA
ttttacatatattgattggaggg

SEQ ID NO: 2590 - DNA, 23 bp, Homo sapiens
  source 1..23: mol_type = genomic DNA
attggcatagcattacactatgg

SEQ ID NO: 2591 - DNA, 23 bp, Homo sapiens
  source 1..23: mol_type = genomic DNA
ccttagatagtattattatgtgg

SEQ ID NO: 2592 - DNA, 23 bp, Homo sapiens
  source 1..23: mol_type = genomic DNA
gtaggcctcaagaccttgaatgg

SEQ ID NO: 2593 - DNA, 23 bp, Homo sapiens
  source 1..23: mol_type = genomic DNA
gtagatgtcacagcgcaaacagg

SEQ ID NO: 2594 - DNA, 23 bp, Homo sapiens
  source 1..23: mol_type = genomic DNA
ggagaaccatgcagtagggtggg

SEQ ID NO: 2595 - DNA, 23 bp, Homo sapiens
  source 1..23: mol_type = genomic DNA
ctcccagctcaactttgggatgg

SEQ ID NO: 2596 - DNA, 23 bp, Homo sapiens
  source 1..23: mol_type = genomic DNA
aggttcttttacttttagcaagg

SEQ ID NO: 2597 - DNA, 23 bp, Homo sapiens
  source 1..23: mol_type = genomic DNA
gtgtcaatcaaaatagtcttcgg

SEQ ID NO: 2598 - DNA, 23 bp, Homo sapiens
  source 1..23: mol_type = genomic DNA
agagaggtgaaggatatctcagg

SEQ ID NO: 2599 - DNA, 23 bp, Homo sapiens
  source 1..23: mol_type = genomic DNA
tctctgctccaatacatacttgg

SEQ ID NO: 2600 - DNA, 23 bp, Homo sapiens
  source 1..23: mol_type = genomic DNA
gttaaaaatctgctaagtaaagg

SEQ ID NO: 2601 - DNA, 23 bp, Homo sapiens
  source 1..23: mol_type = genomic DNA
cttcagccccacaccaaacatgg

SEQ ID NO: 2602 - DNA, 23 bp, Homo sapiens
  source 1..23: mol_type = genomic DNA
atcgtcaatgttgagcgtatcgg

SEQ ID NO: 2603 - DNA, 23 bp, Homo sapiens
  source 1..23: mol_type = genomic DNA
tttaagtcagcacttagctcagg

SEQ ID NO: 2604 - DNA, 23 bp, Homo sapiens
  source 1..23: mol_type = genomic DNA
tcttttcaagaatgattgctggg

SEQ ID NO: 2605 - DNA, 23 bp, Homo sapiens
  source 1..23: mol_type = genomic DNA
agaccccactaaaagacaaaagg

SEQ ID NO: 2606 - DNA, 23 bp, Homo sapiens
  source 1..23: mol_type = genomic DNA
aatgaggaggaaaaaatatgagg

SEQ ID NO: 2607 - DNA, 23 bp, Homo sapiens
  source 1..23: mol_type = genomic DNA
tcattagtcatggagtcctaagg

SEQ ID NO: 2608 - DNA, 23 bp, Homo sapiens
  source 1..23: mol_type = genomic DNA
gatgtatgccctcagagaatggg

SEQ ID NO: 2609 - DNA, 23 bp, Homo sapiens
  source 1..23: mol_type = genomic DNA
gtcctcatgccaagttaaagtgg

SEQ ID NO: 2610 - DNA, 23 bp, Homo sapiens
  source 1..23: mol_type = genomic DNA
atagagtgtgaagaggagatcgg

SEQ ID NO: 2611 - DNA, 23 bp, Homo sapiens
  source 1..23: mol_type = genomic DNA
ttattcccttttctaaaatgagg

SEQ ID NO: 2612 - DNA, 23 bp, Homo sapiens
  source 1..23: mol_type = genomic DNA
tcatattgagcttttggcagagg

SEQ ID NO: 2613 - DNA, 23 bp, Homo sapiens
  source 1..23: mol_type = genomic DNA
agagccactgttctaaaagcagg

SEQ ID NO: 2614 - DNA, 23 bp, Homo sapiens
  source 1..23: mol_type = genomic DNA
gattgaggcctgattcaacttgg

SEQ ID NO: 2615 - DNA, 23 bp, Homo sapiens
  source 1..23: mol_type = genomic DNA
atcattataaggagatgaaaggg

SEQ ID NO: 2616 - DNA, 23 bp, Homo sapiens
  source 1..23: mol_type = genomic DNA
gctgcgttagattttggggaggg

SEQ ID NO: 2617 - DNA, 23 bp, Homo sapiens
  source 1..23: mol_type = genomic DNA
tatttctgtctgtttggagtggg

SEQ ID NO: 2618 - DNA, 23 bp, Homo sapiens
  source 1..23: mol_type = genomic DNA
gctcaactgtgtgttaggcctgg

SEQ ID NO: 2619 - DNA, 23 bp, Homo sapiens
  source 1..23: mol_type = genomic DNA
gagtccagttaaaggtagcttgg

SEQ ID NO: 2620 - DNA, 23 bp, Homo sapiens
  source 1..23: mol_type = genomic DNA
gtaagatagtgtaagtaaagagg

SEQ ID NO: 2621 - DNA, 23 bp, Homo sapiens
  source 1..23: mol_type = genomic DNA
ctaagcatcttttttcaagcggg

SEQ ID NO: 2622 - DNA, 23 bp, Homo sapiens
  source 1..23: mol_type = genomic DNA
gcaaagtgtagtcatctttgtgg

SEQ ID NO: 2623 - DNA, 23 bp, Homo sapiens
  source 1..23: mol_type = genomic DNA
gaacagatgttacgtggtagagg

SEQ ID NO: 2624 - DNA, 23 bp, Homo sapiens
  source 1..23: mol_type = genomic DNA
aagctttagatgctgtacttagg

SEQ ID NO: 2625 - DNA, 23 bp, Homo sapiens
  source 1..23: mol_type = genomic DNA
ttacattttatactaactatggg

SEQ ID NO: 2626 - DNA, 23 bp, Homo sapiens
  source 1..23: mol_type = genomic DNA
tcctttgtctcatatactacggg

SEQ ID NO: 2627 - DNA, 23 bp, Homo sapiens
  source 1..23: mol_type = genomic DNA
catccaagactgaaatggtaggg

SEQ ID NO: 2628 - DNA, 23 bp, Homo sapiens
  source 1..23: mol_type = genomic DNA
tgtcttctatggcaaaccatggg

SEQ ID NO: 2629 - DNA, 23 bp, Homo sapiens
  source 1..23: mol_type = genomic DNA
aaatgtgagtttctctcaaaggg

SEQ ID NO: 2630 - DNA, 23 bp, Homo sapiens
  source 1..23: mol_type = genomic DNA
caggatagcttacttatacaggg

SEQ ID NO: 2631 - DNA, 23 bp, Homo sapiens
  source 1..23: mol_type = genomic DNA
gtctaagtcattggctggaaggg

SEQ ID NO: 2632 - DNA, 23 bp, Homo sapiens
  source 1..23: mol_type = genomic DNA
tttctttctcagcctccaaaagg

SEQ ID NO: 2633 - DNA, 23 bp, Homo sapiens
  source 1..23: mol_type = genomic DNA
tttctttcccctacaatcagtgg

SEQ ID NO: 2634 - DNA, 23 bp, Homo sapiens
  source 1..23: mol_type = genomic DNA
ctacttaagtactagagacttgg

SEQ ID NO: 2635 - DNA, 23 bp, Homo sapiens
  source 1..23: mol_type = genomic DNA
tttgtaagtttatcaaactacgg

SEQ ID NO: 2636 - DNA, 23 bp, Homo sapiens
  source 1..23: mol_type = genomic DNA
ctaaaaagtggagcttgcaaagg

SEQ ID NO: 2637 - DNA, 23 bp, Homo sapiens
  source 1..23: mol_type = genomic DNA
accagtcttttaaacagtatcgg

SEQ ID NO: 2638 - DNA, 23 bp, Homo sapiens
  source 1..23: mol_type = genomic DNA
actgagtaatggaatcttgaggg

SEQ ID NO: 2639 - DNA, 23 bp, Homo sapiens
  source 1..23: mol_type = genomic DNA
ttttaagtcaacaacatacatgg

SEQ ID NO: 2640 - DNA, 23 bp, Homo sapiens
  source 1..23: mol_type = genomic DNA
tttagtttgactcctcagctagg

SEQ ID NO: 2641 - DNA, 23 bp, Homo sapiens
  source 1..23: mol_type = genomic DNA
ggttgaagtgggcatgtggaagg

SEQ ID NO: 2642 - DNA, 23 bp, Homo sapiens
  source 1..23: mol_type = genomic DNA
ccgcagctaataatgacatatgg

SEQ ID NO: 2643 - DNA, 23 bp, Homo sapiens
  source 1..23: mol_type = genomic DNA
tgatgtataggaagcaaagaagg

SEQ ID NO: 2644 - DNA, 23 bp, Homo sapiens
  source 1..23: mol_type = genomic DNA
ctctgtaacttgttttaaggtgg

SEQ ID NO: 2645 - DNA, 23 bp, Homo sapiens
  source 1..23: mol_type = genomic DNA
aagtattgccagagcttgaaggg

SEQ ID NO: 2646 - DNA, 23 bp, Homo sapiens
  source 1..23: mol_type = genomic DNA
tgaaaaggagtaggaggctgagg

SEQ ID NO: 2647 - DNA, 23 bp, Homo sapiens
  source 1..23: mol_type = genomic DNA
gagatatgtgcggctaacacagg

SEQ ID NO: 2648 - DNA, 23 bp, Homo sapiens
  source 1..23: mol_type = genomic DNA
ggagccagaatagggagctaagg

SEQ ID NO: 2649 - DNA, 23 bp, Homo sapiens
  source 1..23: mol_type = genomic DNA
agtgcctctttaatatgcttagg

SEQ ID NO: 2650 - DNA, 23 bp, Homo sapiens
  source 1..23: mol_type = genomic DNA
tctagcctccactctaggattgg

SEQ ID NO: 2651 - DNA, 23 bp, Homo sapiens
  source 1..23: mol_type = genomic DNA
gctgtggcacagtaagcctttgg

SEQ ID NO: 2652 - DNA, 23 bp, Homo sapiens
  source 1..23: mol_type = genomic DNA
attggaatattttctggggaagg

SEQ ID NO: 2653 - DNA, 23 bp, Homo sapiens
  source 1..23: mol_type = genomic DNA
aacttaatatttgcaaaactggg

SEQ ID NO: 2654 - DNA, 23 bp, Homo sapiens
  source 1..23: mol_type = genomic DNA
cctcacacccaactcctcctagg

SEQ ID NO: 2655 - DNA, 23 bp, Homo sapiens
  source 1..23: mol_type = genomic DNA
ttccatagttgattagcgtatgg

SEQ ID NO: 2656 - DNA, 23 bp, Homo sapiens
  source 1..23: mol_type = genomic DNA
aggtgtccgaaaagagcaaaggg

SEQ ID NO: 2657 - DNA, 23 bp, Homo sapiens
  source 1..23: mol_type = genomic DNA
tgtttgtattatagtccaaaagg

SEQ ID NO: 2658 - DNA, 23 bp, Homo sapiens
  source 1..23: mol_type = genomic DNA
aatctgttacactagagatacgg

SEQ ID NO: 2659 - DNA, 23 bp, Homo sapiens
  source 1..23: mol_type = genomic DNA
agttttgtccatatcatagcagg

SEQ ID NO: 2660 - DNA, 23 bp, Homo sapiens
  source 1..23: mol_type = genomic DNA
gtgtatatccataaaaagaatgg

SEQ ID NO: 2661 - DNA, 23 bp, Homo sapiens
  source 1..23: mol_type = genomic DNA
tatcaaaactaagtgcaaatggg

SEQ ID NO: 2662 - DNA, 23 bp, Homo sapiens
  source 1..23: mol_type = genomic DNA
ctatggccccatcattcccatgg

SEQ ID NO: 2663 - DNA, 23 bp, Homo sapiens
  source 1..23: mol_type = genomic DNA
tgatcggcaaaggaagaagctgg

SEQ ID NO: 2664 - DNA, 23 bp, Homo sapiens
  source 1..23: mol_type = genomic DNA
ttaaatagagcaagtatgcttgg

SEQ ID NO: 2665 - DNA, 23 bp, Homo sapiens
  source 1..23: mol_type = genomic DNA
tatgaaacccccataggctacgg

SEQ ID NO: 2666 - DNA, 23 bp, Homo sapiens
  source 1..23: mol_type = genomic DNA
ttgcaaccaaacaaatccttggg

SEQ ID NO: 2667 - DNA, 23 bp, Homo sapiens
  source 1..23: mol_type = genomic DNA
attcatgtattataaaaggctgg

SEQ ID NO: 2668 - DNA, 23 bp, Homo sapiens
  source 1..23: mol_type = genomic DNA
aagagattaatggcaagaagagg

SEQ ID NO: 2669 - DNA, 23 bp, Homo sapiens
  source 1..23: mol_type = genomic DNA
gtttgacaccaataacctatagg

SEQ ID NO: 2670 - DNA, 23 bp, Homo sapiens
  source 1..23: mol_type = genomic DNA
agaaccatgcagtagggtggggg

SEQ ID NO: 2671 - DNA, 23 bp, Homo sapiens
  source 1..23: mol_type = genomic DNA
tctgagcaacatattacaatggg

SEQ ID NO: 2672 - DNA, 23 bp, Homo sapiens
  source 1..23: mol_type = genomic DNA
tttcagaataataaatagtaggg

SEQ ID NO: 2673 - DNA, 23 bp, Homo sapiens
  source 1..23: mol_type = genomic DNA
atatatctttcaaaaatagctgg

SEQ ID NO: 2674 - DNA, 23 bp, Homo sapiens
  source 1..23: mol_type = genomic DNA
ggtagcagaaagaatgaggttgg

SEQ ID NO: 2675 - DNA, 23 bp, Homo sapiens
  source 1..23: mol_type = genomic DNA
gacatctgaggaggaacaaaggg

SEQ ID NO: 2676 - DNA, 23 bp, Homo sapiens
  source 1..23: mol_type = genomic DNA
atatgcatataagatgtcattgg

SEQ ID NO: 2677 - DNA, 23 bp, Homo sapiens
  source 1..23: mol_type = genomic DNA
gaggaatcagaaaactgaaaagg

SEQ ID NO: 2678 - DNA, 23 bp, Homo sapiens
  source 1..23: mol_type = genomic DNA
gatgatgtatctttgattgaggg

SEQ ID NO: 2679 - DNA, 23 bp, Homo sapiens
  source 1..23: mol_type = genomic DNA
gttatcataaatcctgtcctagg

SEQ ID NO: 2680 - DNA, 23 bp, Homo sapiens
  source 1..23: mol_type = genomic DNA
ttagtttaaaagaactctgtagg

SEQ ID NO: 2681 - DNA, 23 bp, Homo sapiens
  source 1..23: mol_type = genomic DNA
gcttgatctttcataaacactgg

SEQ ID NO: 2682 - DNA, 23 bp, Homo sapiens
  source 1..23: mol_type = genomic DNA
tcctggctgttagactcactggg

SEQ ID NO: 2683 - DNA, 23 bp, Homo sapiens
  source 1..23: mol_type = genomic DNA
cttcaagggcacagattacaggg

SEQ ID NO: 2684 - DNA, 23 bp, Homo sapiens
  source 1..23: mol_type = genomic DNA
attgaagaaatgtattagagtgg

SEQ ID NO: 2685 - DNA, 23 bp, Homo sapiens
  source 1..23: mol_type = genomic DNA
ttacgtattcctcttagaaaggg

SEQ ID NO: 2686 - DNA, 23 bp, Homo sapiens
  source 1..23: mol_type = genomic DNA
ggaggaaagcagttttgcattgg

SEQ ID NO: 2687 - DNA, 23 bp, Homo sapiens
  source 1..23: mol_type = genomic DNA
atatctaatgtttcatcacatgg

SEQ ID NO: 2688 - DNA, 23 bp, Homo sapiens
  source 1..23: mol_type = genomic DNA
tgcacctgtttcttccactccgg

SEQ ID NO: 2689 - DNA, 23 bp, Homo sapiens
  source 1..23: mol_type = genomic DNA
gatattttttatactatcaaggg

SEQ ID NO: 2690 - DNA, 23 bp, Homo sapiens
  source 1..23: mol_type = genomic DNA
gagcctttaaaataccatgtagg

SEQ ID NO: 2691 - DNA, 23 bp, Homo sapiens
  source 1..23: mol_type = genomic DNA
gtttccttttgttctctggaggg

SEQ ID NO: 2692 - DNA, 23 bp, Homo sapiens
  source 1..23: mol_type = genomic DNA
ttagcattgttattccgtctggg

SEQ ID NO: 2693 - DNA, 23 bp, Homo sapiens
  source 1..23: mol_type = genomic DNA
acttgctcgattaggtttggtgg

SEQ ID NO: 2694 - DNA, 23 bp, Homo sapiens
  source 1..23: mol_type = genomic DNA
tattgatgcccctctacaaaagg

SEQ ID NO: 2695 - DNA, 23 bp, Homo sapiens
  source 1..23: mol_type = genomic DNA
cccaattgagtgttttccaaagg

SEQ ID NO: 2696 - DNA, 23 bp, Homo sapiens
  source 1..23: mol_type = genomic DNA
ttagttttaatggcccaaaaggg

SEQ ID NO: 2697 - DNA, 23 bp, Homo sapiens
  source 1..23: mol_type = genomic DNA
agggctcctcaattgttgcatgg

SEQ ID NO: 2698 - DNA, 23 bp, Homo sapiens
  source 1..23: mol_type = genomic DNA
tactgcagaacaattatggccgg

SEQ ID NO: 2699 - DNA, 23 bp, Homo sapiens
  source 1..23: mol_type = genomic DNA
atttatttctgtactaagatcgg

SEQ ID NO: 2700 - DNA, 23 bp, Homo sapiens
  source 1..23: mol_type = genomic DNA
agctatttaggcttggtcgccgg

SEQ ID NO: 2701 - DNA, 23 bp, Homo sapiens
  source 1..23: mol_type = genomic DNA
tcagggattcacaagagagcagg

SEQ ID NO: 2702 - DNA, 23 bp, Homo sapiens
  source 1..23: mol_type = genomic DNA
acagactagttcttaaagatagg

SEQ ID NO: 2703 - DNA, 23 bp, Homo sapiens
  source 1..23: mol_type = genomic DNA
tttcttgtgtagtaataacttgg

SEQ ID NO: 2704 - DNA, 23 bp, Homo sapiens
  source 1..23: mol_type = genomic DNA
aatagactaaaactttacatagg

SEQ ID NO: 2705 - DNA, 23 bp, Homo sapiens
  source 1..23: mol_type = genomic DNA
atcctttgtctcatatactacgg

SEQ ID NO: 2706 - DNA, 23 bp, Homo sapiens
  source 1..23: mol_type = genomic DNA
gcagttaacattcatatgaaagg

SEQ ID NO: 2707 - DNA, 23 bp, Homo sapiens
  source 1..23: mol_type = genomic DNA
ctacaggccatgggaatgatggg

SEQ ID NO: 2708 - DNA, 23 bp, Homo sapiens
  source 1..23: mol_type = genomic DNA
agagattaatggcaagaagaggg

SEQ ID NO: 2709 - DNA, 23 bp, Homo sapiens
  source 1..23: mol_type = genomic DNA
aggagctgcagcttttcaaaggg

SEQ ID NO: 2710 - DNA, 23 bp, Homo sapiens
  source 1..23: mol_type = genomic DNA
catcccctcaaattgttcaatgg

SEQ ID NO: 2711 - DNA, 23 bp, Homo sapiens
  source 1..23: mol_type = genomic DNA
ggaagtcaacaaattgtcaatgg

SEQ ID NO: 2712 - DNA, 23 bp, Homo sapiens
  source 1..23: mol_type = genomic DNA
tatcaatcatcgctgagaaaagg

SEQ ID NO: 2713 - DNA, 23 bp, Homo sapiens
  source 1..23: mol_type = genomic DNA
gcaaccggagtggaagaaacagg

SEQ ID NO: 2714 - DNA, 23 bp, Homo sapiens
  source 1..23: mol_type = genomic DNA
aaaaaattattccagttacatgg

SEQ ID NO: 2715 - DNA, 23 bp, Homo sapiens
  source 1..23: mol_type = genomic DNA
acttatttgcgcgggtaatgagg

SEQ ID NO: 2716 - DNA, 23 bp, Homo sapiens
  source 1..23: mol_type = genomic DNA
agaatcattttccaagcagatgg

SEQ ID NO: 2717 - DNA, 23 bp, Homo sapiens
  source 1..23: mol_type = genomic DNA
ttatacttatattcaagcacagg

SEQ ID NO: 2718 - DNA, 23 bp, Homo sapiens
  source 1..23: mol_type = genomic DNA
tatctcatacaccttttgctggg

SEQ ID NO: 2719 - DNA, 23 bp, Homo sapiens
  source 1..23: mol_type = genomic DNA
tctaatttacatcctatacttgg

SEQ ID NO: 2720 - DNA, 23 bp, Homo sapiens
  source 1..23: mol_type = genomic DNA
tctgggttttgcatgacagctgg

SEQ ID NO: 2721 - DNA, 23 bp, Homo sapiens
  source 1..23: mol_type = genomic DNA
gccgcaggtatgtcattcatagg

SEQ ID NO: 2722 - DNA, 23 bp, Homo sapiens
  source 1..23: mol_type = genomic DNA
gatctgtgagagatgggaatagg

SEQ ID NO: 2723 - DNA, 23 bp, Homo sapiens
  source 1..23: mol_type = genomic DNA
ttaaaaaaaaagaagcctctcgg

SEQ ID NO: 2724 - DNA, 23 bp, Homo sapiens
  source 1..23: mol_type = genomic DNA
gcctttgaccatattctgaaagg

SEQ ID NO: 2725 - DNA, 23 bp, Homo sapiens
  source 1..23: mol_type = genomic DNA
gattgcatatctttcccataggg

SEQ ID NO: 2726 - DNA, 23 bp, Homo sapiens
  source 1..23: mol_type = genomic DNA
tatctaaatgtgaagttggcggg

SEQ ID NO: 2727 - DNA, 23 bp, Homo sapiens
  source 1..23: mol_type = genomic DNA
cctggattatttccatctatggg

SEQ ID NO: 2728 - DNA, 23 bp, Homo sapiens
  source 1..23: mol_type = genomic DNA
ttctgagctgccttagcaaaggg

SEQ ID NO: 2729 - DNA, 23 bp, Homo sapiens
  source 1..23: mol_type = genomic DNA
agtttacattatttgctcatcgg

SEQ ID NO: 2730 - DNA, 23 bp, Homo sapiens
  source 1..23: mol_type = genomic DNA
acagcataattttctacatacgg

SEQ ID NO: 2731 - DNA, 23 bp, Homo sapiens
  source 1..23: mol_type = genomic DNA
tgtggcccaaaagaaaagatagg

SEQ ID NO: 2732 - DNA, 23 bp, Homo sapiens
  source 1..23: mol_type = genomic DNA
gctgcattaatcataatgcttgg

SEQ ID NO: 2733 - DNA, 23 bp, Homo sapiens
  source 1..23: mol_type = genomic DNA
taattctgagggcgttttggagg

SEQ ID NO: 2734 - DNA, 23 bp, Homo sapiens
  source 1..23: mol_type = genomic DNA
ttttgtgtttagaaatgctaggg

SEQ ID NO: 2735 - DNA, 23 bp, Homo sapiens
  source 1..23: mol_type = genomic DNA
ttatttttattcagtatatgtgg

SEQ ID NO: 2736 - DNA, 23 bp, Homo sapiens
  source 1..23: mol_type = genomic DNA
acacctttttaaatacaccttgg

SEQ ID NO: 2737 - DNA, 23 bp, Homo sapiens
  source 1..23: mol_type = genomic DNA
tttaagtgactgtctattggagg

SEQ ID NO: 2738 - DNA, 23 bp, Homo sapiens
  source 1..23: mol_type = genomic DNA
gtgttgactcactcagtgttggg

SEQ ID NO: 2739 - DNA, 23 bp, Homo sapiens
  source 1..23: mol_type = genomic DNA
cttaccttacttgcaaaggatgg

SEQ ID NO: 2740 - DNA, 23 bp, Homo sapiens
  source 1..23: mol_type = genomic DNA
acaaaaagttagttttctgtagg

SEQ ID NO: 2741 - DNA, 23 bp, Homo sapiens
  source 1..23: mol_type = genomic DNA
aaagacatactaggataaagtgg

SEQ ID NO: 2742 - DNA, 23 bp, Homo sapiens
  source 1..23: mol_type = genomic DNA
ttaacatcagaaagaacgttggg

SEQ ID NO: 2743 - DNA, 23 bp, Homo sapiens
  source 1..23: mol_type = genomic DNA
ttaatgataaacattagataagg

SEQ ID NO: 2744 - DNA, 23 bp, Homo sapiens
  source 1..23: mol_type = genomic DNA
gatgcatatgagattattggagg

SEQ ID NO: 2745 - DNA, 23 bp, Homo sapiens
  source 1..23: mol_type = genomic DNA
caatctagaggaaatggcttcgg

SEQ ID NO: 2746 - DNA, 23 bp, Homo sapiens
  source 1..23: mol_type = genomic DNA
ggaaatattttcatgaaacctgg

SEQ ID NO: 2747 - DNA, 23 bp, Homo sapiens
  source 1..23: mol_type = genomic DNA
atttaaggggaaaaaggtgttgg

SEQ ID NO: 2748 - DNA, 23 bp, Homo sapiens
  source 1..23: mol_type = genomic DNA
gtgtcatcctaagaaacaattgg

SEQ ID NO: 2749 - DNA, 23 bp, Homo sapiens
  source 1..23: mol_type = genomic DNA
tgctgcctgctgtatctcactgg

SEQ ID NO: 2750 - DNA, 23 bp, Homo sapiens
  source 1..23: mol_type = genomic DNA
tcacttgaagatttttagtaggg

SEQ ID NO: 2751 - DNA, 23 bp, Homo sapiens
  source 1..23: mol_type = genomic DNA
gcaagatactgcatggaactcgg

SEQ ID NO: 2752 - DNA, 23 bp, Homo sapiens
  source 1..23: mol_type = genomic DNA
ttcttcaaggatgtgttgtaggg

SEQ ID NO: 2753 - DNA, 23 bp, Homo sapiens
  source 1..23: mol_type = genomic DNA
tgacaagtgatcctcaaaacagg

SEQ ID NO: 2754 - DNA, 23 bp, Homo sapiens
  source 1..23: mol_type = genomic DNA
ataacaaattaagatctaaaggg

SEQ ID NO: 2755 - DNA, 23 bp, Homo sapiens
  source 1..23: mol_type = genomic DNA
ggaattcacaaacacagataggg

SEQ ID NO: 2756 - DNA, 23 bp, Homo sapiens
  source 1..23: mol_type = genomic DNA
catatgttctgtacatcagccgg

SEQ ID NO: 2757 - DNA, 23 bp, Homo sapiens
  source 1..23: mol_type = genomic DNA
aagctggtaaacctcattgtagg

SEQ ID NO: 2758 - DNA, 23 bp, Homo sapiens
  source 1..23: mol_type = genomic DNA
cattgtggatgtagagtcattgg

SEQ ID NO: 2759 - DNA, 23 bp, Homo sapiens
  source 1..23: mol_type = genomic DNA
gggtgaccacagtttaaagaagg

SEQ ID NO: 2760 - DNA, 23 bp, Homo sapiens
  source 1..23: mol_type = genomic DNA
atatgcatacctcttaaaatggg

SEQ ID NO: 2761 - DNA, 23 bp, Homo sapiens
  source 1..23: mol_type = genomic DNA
cataggatcacaattcatctagg

SEQ ID NO: 2762 - DNA, 23 bp, Homo sapiens
  source 1..23: mol_type = genomic DNA
atccctcacgttcttcaggttgg

SEQ ID NO: 2763 - DNA, 23 bp, Homo sapiens
  source 1..23: mol_type = genomic DNA
atttaattaatcttcagtgatgg

SEQ ID NO: 2764 - DNA, 23 bp, Homo sapiens
  source 1..23: mol_type = genomic DNA
ttaaaaaaatacaatggtaaggg

SEQ ID NO: 2765 - DNA, 23 bp, Homo sapiens
  source 1..23: mol_type = genomic DNA
ctacagggttattttgtggttgg

SEQ ID NO: 2766 - DNA, 23 bp, Homo sapiens
  source 1..23: mol_type = genomic DNA
tatgtctaatgggtgctcaatgg

SEQ ID NO: 2767 - DNA, 23 bp, Homo sapiens
  source 1..23: mol_type = genomic DNA
tggatgtagtagttgagtagtgg

SEQ ID NO: 2768 - DNA, 23 bp, Homo sapiens
  source 1..23: mol_type = genomic DNA
ttatgctcatctctaggtatggg

SEQ ID NO: 2769 - DNA, 23 bp, Homo sapiens
  source 1..23: mol_type = genomic DNA
aataatatgggacaccgtaatgg

SEQ ID NO: 2770 - DNA, 23 bp, Homo sapiens
  source 1..23: mol_type = genomic DNA
tgtaaaatgatgaaagcaaaggg

SEQ ID NO: 2771 - DNA, 23 bp, Homo sapiens
  source 1..23: mol_type = genomic DNA
gctcttttggtgtgatcaagggg

SEQ ID NO: 2772 - DNA, 23 bp, Homo sapiens
  source 1..23: mol_type = genomic DNA
gctgcttgaaatgactaaacagg

SEQ ID NO: 2773 - DNA, 23 bp, Homo sapiens
  source 1..23: mol_type = genomic DNA
gcaaagcttgaaatagcaaaagg

SEQ ID NO: 2774 - DNA, 23 bp, Homo sapiens
  source 1..23: mol_type = genomic DNA
gtaaaatatgacaaaactctagg

SEQ ID NO: 2775 - DNA, 23 bp, Homo sapiens
  source 1..23: mol_type = genomic DNA
gatacagtctaggggtggacagg

SEQ ID NO: 2776 - DNA, 23 bp, Homo sapiens
  source 1..23: mol_type = genomic DNA
cagccctctaccctaaataaggg

SEQ ID NO: 2777 - DNA, 23 bp, Homo sapiens
  source 1..23: mol_type = genomic DNA
gtaaactattgtagctctaaggg

SEQ ID NO: 2778 - DNA, 23 bp, Homo sapiens
  source 1..23: mol_type = genomic DNA
gaaacttgatagccttttggagg

SEQ ID NO: 2779 - DNA, 23 bp, Homo sapiens
  source 1..23: mol_type = genomic DNA
attaagctctacattggctaagg

SEQ ID NO: 2780 - DNA, 23 bp, Homo sapiens
  source 1..23: mol_type = genomic DNA
aatctgaaggacaagaagcttgg

SEQ ID NO: 2781 - DNA, 23 bp, Homo sapiens
  source 1..23: mol_type = genomic DNA
tctgaaacactgaagatcaatgg

SEQ ID NO: 2782 - DNA, 23 bp, Homo sapiens
  source 1..23: mol_type = genomic DNA
ttttggagcattataaaggaagg

SEQ ID NO: 2783 - DNA, 23 bp, Homo sapiens
  source 1..23: mol_type = genomic DNA
atacatagcaagacatgtattgg

SEQ ID NO: 2784 - DNA, 23 bp, Homo sapiens
  source 1..23: mol_type = genomic DNA
gtgtatgcaactaagatgattgg

SEQ ID NO: 2785 - DNA, 23 bp, Homo sapiens
  source 1..23: mol_type = genomic DNA
gggatggctggggggaatgtggg

SEQ ID NO: 2786 - DNA, 23 bp, Homo sapiens
  source 1..23: mol_type = genomic DNA
gtagtgtttgcagcatgaaaagg

SEQ ID NO: 2787 - DNA, 23 bp, Homo sapiens
  source 1..23: mol_type = genomic DNA
tagaaaggatatttctagagagg

SEQ ID NO: 2788 - DNA, 23 bp, Homo sapiens
  source 1..23: mol_type = genomic DNA
aatttttgagaatggaagctggg

SEQ ID NO: 2789 - DNA, 23 bp, Homo sapiens
  source 1..23: mol_type = genomic DNA
attactttcgatctcaagactgg

SEQ ID NO: 2790 - DNA, 23 bp, Homo sapiens
  source 1..23: mol_type = genomic DNA
tggctaaaacatctatagaaagg

SEQ ID NO: 2791 - DNA, 23 bp, Homo sapiens
  source 1..23: mol_type = genomic DNA
cattctgcatatatttaacatgg

SEQ ID NO: 2792 - DNA, 23 bp, Homo sapiens
  source 1..23: mol_type = genomic DNA
gctccatttaaaactatggcagg

SEQ ID NO: 2793 - DNA, 23 bp, Homo sapiens
  source 1..23: mol_type = genomic DNA
tgatgccgaaaagaacatatagg

SEQ ID NO: 2794 - DNA, 23 bp, Homo sapiens
  source 1..23: mol_type = genomic DNA
gagaatattgagaaataaggtgg

SEQ ID NO: 2795 - DNA, 23 bp, Homo sapiens
  source 1..23: mol_type = genomic DNA
gtattaccagccaagtgccttgg

SEQ ID NO: 2796 - DNA, 23 bp, Homo sapiens
  source 1..23: mol_type = genomic DNA
ttgtgttctaaattcaaagaagg

SEQ ID NO: 2797 - DNA, 23 bp, Homo sapiens
  source 1..23: mol_type = genomic DNA
ggaggccccaatactgttgaagg

SEQ ID NO: 2798 - DNA, 23 bp, Homo sapiens
  source 1..23: mol_type = genomic DNA
gtatagtgtgttacagaacttgg

SEQ ID NO: 2799 - DNA, 23 bp, Homo sapiens
  source 1..23: mol_type = genomic DNA
attgtgaaacaatctcaaatagg

SEQ ID NO: 2800 - DNA, 23 bp, Homo sapiens
  source 1..23: mol_type = genomic DNA
atagcagtcaatgcttatatggg

SEQ ID NO: 2801 - DNA, 23 bp, Homo sapiens
  source 1..23: mol_type = genomic DNA
ctaatttgttgcccatgtcaggg

SEQ ID NO: 2802 - DNA, 23 bp, Homo sapiens
  source 1..23: mol_type = genomic DNA
cttgctatgtatggccaaacggg

SEQ ID NO: 2803 - DNA, 23 bp, Homo sapiens
  source 1..23: mol_type = genomic DNA
atttgattcgaatttaaatgagg

SEQ ID NO: 2804 - DNA, 23 bp, Homo sapiens
  source 1..23: mol_type = genomic DNA
aggaaaattgcagaatgcagagg

SEQ ID NO: 2805 - DNA, 23 bp, Homo sapiens
  source 1..23: mol_type = genomic DNA
gctccatgcatttttaagtacgg

SEQ ID NO: 2806 - DNA, 23 bp, Homo sapiens
  source 1..23: mol_type = genomic DNA
ggctttaaagatctaaactaagg

SEQ ID NO: 2807 - DNA, 23 bp, Homo sapiens
  source 1..23: mol_type = genomic DNA
gattatcaactaaggctgaatgg

SEQ ID NO: 2808 - DNA, 23 bp, Homo sapiens
  source 1..23: mol_type = genomic DNA
gtaaaactttacttgtatgttgg

SEQ ID NO: 2809 - DNA, 23 bp, Homo sapiens
  source 1..23: mol_type = genomic DNA
aagagagtatccatctcctaagg

SEQ ID NO: 2810 - DNA, 23 bp, Homo sapiens
  source 1..23: mol_type = genomic DNA
ggatatgggtgactgccaacagg

SEQ ID NO: 2811 - DNA, 23 bp, Homo sapiens
  source 1..23: mol_type = genomic DNA
ttgtttgcttgatttatacatgg

SEQ ID NO: 2812 - DNA, 23 bp, Homo sapiens
  source 1..23: mol_type = genomic DNA
aaataactctttaaaggaaaggg

SEQ ID NO: 2813 - DNA, 23 bp, Homo sapiens
  source 1..23: mol_type = genomic DNA
ataattgagttagaaggtagagg

SEQ ID NO: 2814 - DNA, 23 bp, Homo sapiens
  source 1..23: mol_type = genomic DNA
tgccagcgtgatttcttcaaagg

SEQ ID NO: 2815 - DNA, 23 bp, Homo sapiens
  source 1..23: mol_type = genomic DNA
gagtacaattggctcctagaagg

SEQ ID NO: 2816 - DNA, 23 bp, Homo sapiens
  source 1..23: mol_type = genomic DNA
ctagctccctgccacaaagatgg

SEQ ID NO: 2817 - DNA, 23 bp, Homo sapiens
  source 1..23: mol_type = genomic DNA
ttagttcttctgccatacatagg

SEQ ID NO: 2818 - DNA, 23 bp, Homo sapiens
  source 1..23: mol_type = genomic DNA
gttggaaaaacagtgccatctgg

SEQ ID NO: 2819 - DNA, 23 bp, Homo sapiens
  source 1..23: mol_type = genomic DNA
ttccaaatttaaattcccattgg

SEQ ID NO: 2820 - DNA, 23 bp, Homo sapiens
  source 1..23: mol_type = genomic DNA
aactccttgtctcttttggaagg

SEQ ID NO: 2821 - DNA, 23 bp, Homo sapiens
  source 1..23: mol_type = genomic DNA
atccttctatgagcaaaagttgg

SEQ ID NO: 2822 - DNA, 23 bp, Homo sapiens
  source 1..23: mol_type = genomic DNA
attttactgccagtttcagcagg

SEQ ID NO: 2823 - DNA, 23 bp, Homo sapiens
  source 1..23: mol_type = genomic DNA
tattcaacagtcacagaaagagg

SEQ ID NO: 2824 - DNA, 23 bp, Homo sapiens
  source 1..23: mol_type = genomic DNA
atagaattcaagcaatttggagg

SEQ ID NO: 2825 - DNA, 23 bp, Homo sapiens
  source 1..23: mol_type = genomic DNA
aaactagcatattttcccattgg

SEQ ID NO: 2826 - DNA, 23 bp, Homo sapiens
  source 1..23: mol_type = genomic DNA
aggtggctgttaatgataagagg

SEQ ID NO: 2827 - DNA, 23 bp, Homo sapiens
  source 1..23: mol_type = genomic DNA
gttggaatagcaatagaaaaggg

SEQ ID NO: 2828 - DNA, 23 bp, Homo sapiens
  source 1..23: mol_type = genomic DNA
aattttattttctaacctgttgg

SEQ ID NO: 2829 - DNA, 23 bp, Homo sapiens
  source 1..23: mol_type = genomic DNA
tgtaatttaggtgaaattgttgg

SEQ ID NO: 2830 - DNA, 23 bp, Homo sapiens
  source 1..23: mol_type = genomic DNA
ctgtttgttttctaagcaaaggg

SEQ ID NO: 2831 - DNA, 23 bp, Homo sapiens
  source 1..23: mol_type = genomic DNA
gcctttgttgttgccttcagggg

SEQ ID NO: 2832 - DNA, 23 bp, Homo sapiens
  source 1..23: mol_type = genomic DNA
atatttttattacaagtatgtgg

SEQ ID NO: 2833 - DNA, 23 bp, Homo sapiens
  source 1..23: mol_type = genomic DNA
ggaaaatcaaaccaagcaaaagg

SEQ ID NO: 2834 - DNA, 23 bp, Homo sapiens
  source 1..23: mol_type = genomic DNA
agctgatgagattttagaagagg

SEQ ID NO: 2835 - DNA, 23 bp, Homo sapiens
  source 1..23: mol_type = genomic DNA
gcacagaaatgtagatttcgcgg

SEQ ID NO: 2836 - DNA, 23 bp, Homo sapiens
  source 1..23: mol_type = genomic DNA
ttctgataaccccttcgaatggg

SEQ ID NO: 2837 - DNA, 23 bp, Homo sapiens
  source 1..23: mol_type = genomic DNA
cttgatgaattcagaatctaggg

SEQ ID NO: 2838 - DNA, 23 bp, Homo sapiens
  source 1..23: mol_type = genomic DNA
ccttgaaattgctaatacaatgg

SEQ ID NO: 2839 - DNA, 23 bp, Homo sapiens
  source 1..23: mol_type = genomic DNA
tcttatctatatgatgggatggg

SEQ ID NO: 2840 - DNA, 23 bp, Homo sapiens
  source 1..23: mol_type = genomic DNA
agagactaaccagtgacaactgg

SEQ ID NO: 2841 - DNA, 23 bp, Homo sapiens
  source 1..23: mol_type = genomic DNA
ttctttttgtaataggagatggg

SEQ ID NO: 2842 - DNA, 23 bp, Homo sapiens
  source 1..23: mol_type = genomic DNA
gacatattcctgactccagcagg

SEQ ID NO: 2843 - DNA, 23 bp, Homo sapiens
  source 1..23: mol_type = genomic DNA
atataattcttattatttcaggg

SEQ ID NO: 2844 - DNA, 23 bp, Homo sapiens
  source 1..23: mol_type = genomic DNA
ccacagtgaaagaaacaaacagg

SEQ ID NO: 2845 - DNA, 23 bp, Homo sapiens
  source 1..23: mol_type = genomic DNA
ccattaaccttatctttgaaagg

SEQ ID NO: 2846 - DNA, 23 bp, Homo sapiens
  source 1..23: mol_type = genomic DNA
agtttccttttgttctctggagg

SEQ ID NO: 2847 - DNA, 23 bp, Homo sapiens
  source 1..23: mol_type = genomic DNA
gtaagttgttgctaaattgtggg

SEQ ID NO: 2848 - DNA, 23 bp, Homo sapiens
  source 1..23: mol_type = genomic DNA
ttatggggaatttaaaagtgtgg

SEQ ID NO: 2849 - DNA, 23 bp, Homo sapiens
  source 1..23: mol_type = genomic DNA
aaccatgatatctccaacaacgg

SEQ ID NO: 2850 - DNA, 23 bp, Homo sapiens
  source 1..23: mol_type = genomic DNA
ttttgagcaaacgtttatagagg

SEQ ID NO: 2851 - DNA, 23 bp, Homo sapiens
  source 1..23: mol_type = genomic DNA
acagtaattggcactgaaagagg

SEQ ID NO: 2852 - DNA, 23 bp, Homo sapiens
  source 1..23: mol_type = genomic DNA
taaatcttagactaaaatgttgg

SEQ ID NO: 2853 - DNA, 23 bp, Homo sapiens
  source 1..23: mol_type = genomic DNA
attccagataagaagacccttgg

SEQ ID NO: 2854 - DNA, 23 bp, Homo sapiens
  source 1..23: mol_type = genomic DNA
cttgctttactcttaagcactgg

SEQ ID NO: 2855 - DNA, 23 bp, Homo sapiens
  source 1..23: mol_type = genomic DNA
tatattatgcccaaggcacttgg

SEQ ID NO: 2856 - DNA, 23 bp, Homo sapiens
  source 1..23: mol_type = genomic DNA
ttactttctttaatctacaaagg

SEQ ID NO: 2857 - DNA, 23 bp, Homo sapiens
  source 1..23: mol_type = genomic DNA
aggtctccagtgtaatttagagg

SEQ ID NO: 2858 - DNA, 23 bp, Homo sapiens
  source 1..23: mol_type = genomic DNA
ttcaaagagtaccatataagcgg

SEQ ID NO: 2859 - DNA, 23 bp, Homo sapiens
  source 1..23: mol_type = genomic DNA
acatagacaaagaaataagtagg

SEQ ID NO: 2860 - DNA, 23 bp, Homo sapiens
  source 1..23: mol_type = genomic DNA
gcagcgtgaaaaaatcctacagg

SEQ ID NO: 2861 - DNA, 23 bp, Homo sapiens
  source 1..23: mol_type = genomic DNA
cagtacttaaaagtattaaacgg

SEQ ID NO: 2862 - DNA, 23 bp, Homo sapiens
  source 1..23: mol_type = genomic DNA
atattgcaattagtatctatagg

SEQ ID NO: 2863 - DNA, 23 bp, Homo sapiens
  source 1..23: mol_type = genomic DNA
gtttccaaaccggaacactttgg

SEQ ID NO: 2864 - DNA, 23 bp, Homo sapiens
  source 1..23: mol_type = genomic DNA
ttcttagcagaaaaactcatagg

SEQ ID NO: 2865 - DNA, 23 bp, Homo sapiens
  source 1..23: mol_type = genomic DNA
tcaatactattaacaaccccagg

SEQ ID NO: 2866 - DNA, 23 bp, Homo sapiens
  source 1..23: mol_type = genomic DNA
tcctcactatgaattagattagg

SEQ ID NO: 2867 - DNA, 23 bp, Homo sapiens
  source 1..23: mol_type = genomic DNA
atattctgcactccatcgtcagg

SEQ ID NO: 2868 - DNA, 23 bp, Homo sapiens
  source 1..23: mol_type = genomic DNA
ccaaggtataatctatttgaggg

SEQ ID NO: 2869 - DNA, 23 bp, Homo sapiens
  source 1..23: mol_type = genomic DNA
agagaagtggaaggtttagaggg

SEQ ID NO: 2870 - DNA, 23 bp, Homo sapiens
  source 1..23: mol_type = genomic DNA
cttcaagcccccagtgaagtagg

SEQ ID NO: 2871 - DNA, 23 bp, Homo sapiens
  source 1..23: mol_type = genomic DNA
cttgtttcacaacatttatgtgg

SEQ ID NO: 2872 - DNA, 23 bp, Homo sapiens
  source 1..23: mol_type = genomic DNA
caaaaaatcgactcttggaatgg

SEQ ID NO: 2873 - DNA, 23 bp, Homo sapiens
  source 1..23: mol_type = genomic DNA
tctgacaagttggcttaaaaggg

SEQ ID NO: 2874 - DNA, 23 bp, Homo sapiens
  source 1..23: mol_type = genomic DNA
ctttccctcacagatccctcagg

SEQ ID NO: 2875 - DNA, 23 bp, Homo sapiens
  source 1..23: mol_type = genomic DNA
gcatccaaatacccctcataggg

SEQ ID NO: 2876 - DNA, 23 bp, Homo sapiens
  source 1..23: mol_type = genomic DNA
atgtatctgtttatacaagttgg

SEQ ID NO: 2877 - DNA, 23 bp, Homo sapiens
  source 1..23: mol_type = genomic DNA
ttttccatctctcattcagatgg

SEQ ID NO: 2878 - DNA, 23 bp, Homo sapiens
  source 1..23: mol_type = genomic DNA
cttttgttgtgcacgtatatggg

SEQ ID NO: 2879 - DNA, 23 bp, Homo sapiens
  source 1..23: mol_type = genomic DNA
gggcatacatccgtgttactagg

SEQ ID NO: 2880 - DNA, 23 bp, Homo sapiens
  source 1..23: mol_type = genomic DNA
ataagggcaaattaaaatgcagg

SEQ ID NO: 2881 - DNA, 23 bp, Homo sapiens
  source 1..23: mol_type = genomic DNA
ctgggcagagaagtcatgcttgg

SEQ ID NO: 2882 - DNA, 23 bp, Homo sapiens
  source 1..23: mol_type = genomic DNA
acagtgttacatttaatgctagg

SEQ ID NO: 2883 - DNA, 23 bp, Homo sapiens
  source 1..23: mol_type = genomic DNA
agcttatgatcagatggttaggg

SEQ ID NO: 2884 - DNA, 23 bp, Homo sapiens
  source 1..23: mol_type = genomic DNA
tatctactctgcatgaagctagg

SEQ ID NO: 2885 - DNA, 23 bp, Homo sapiens
  source 1..23: mol_type = genomic DNA
aatagactattttgaagcaaagg

SEQ ID NO: 2886 - DNA, 23 bp, Homo sapiens
  source 1..23: mol_type = genomic DNA
agtacattacagaaaaaggctgg

SEQ ID NO: 2887 - DNA, 23 bp, Homo sapiens
  source 1..23: mol_type = genomic DNA
taggcactgtgcaagttagttgg

SEQ ID NO: 2888 - DNA, 23 bp, Homo sapiens
  source 1..23: mol_type = genomic DNA
gtgtgtgtgtgtattgtagcagg

SEQ ID NO: 2889 - DNA, 23 bp, Homo sapiens
  source 1..23: mol_type = genomic DNA
attgtaaagtcaataaataacgg

SEQ ID NO: 2890 - DNA, 23 bp, Homo sapiens
  source 1..23: mol_type = genomic DNA
ttatcaagatacttgaaagcagg

SEQ ID NO: 2891 - DNA, 23 bp, Homo sapiens
  source 1..23: mol_type = genomic DNA
aattctgctcttgagaaaagagg

SEQ ID NO: 2892 - DNA, 23 bp, Homo sapiens
  source 1..23: mol_type = genomic DNA
tttgtcacaaccctagaaatggg

SEQ ID NO: 2893 - DNA, 23 bp, Homo sapiens
  source 1..23: mol_type = genomic DNA
ggtgtaacaaaaagtgataatgg

SEQ ID NO: 2894 - DNA, 23 bp, Homo sapiens
  source 1..23: mol_type = genomic DNA
ccatcatttgcagggctggaggg

SEQ ID NO: 2895 - DNA, 23 bp, Homo sapiens
  source 1..23: mol_type = genomic DNA
atggagattgtaatatttggtgg

SEQ ID NO: 2896 - DNA, 23 bp, Homo sapiens
  source 1..23: mol_type = genomic DNA
ttgtaaagtcaataaataacggg

SEQ ID NO: 2897 - DNA, 23 bp, Homo sapiens
  source 1..23: mol_type = genomic DNA
attcccttatttagggtagaggg

SEQ ID NO: 2898 - DNA, 23 bp, Homo sapiens
  source 1..23: mol_type = genomic DNA
ttacttgcctttgtaggtagagg

SEQ ID NO: 2899 - DNA, 23 bp, Homo sapiens
  source 1..23: mol_type = genomic DNA
agtctctaatagcaaacaaaagg

SEQ ID NO: 2900 - DNA, 23 bp, Homo sapiens
  source 1..23: mol_type = genomic DNA
aggtcagtcactggaccctcagg

SEQ ID NO: 2901 - DNA, 23 bp, Homo sapiens
  source 1..23: mol_type = genomic DNA
ctgactttattttgtccctaggg

SEQ ID NO: 2902 - DNA, 23 bp, Homo sapiens
  source 1..23: mol_type = genomic DNA
ggcttagtcctcaataagtaagg

SEQ ID NO: 2903 - DNA, 23 bp, Homo sapiens
  source 1..23: mol_type = genomic DNA
gctgtgtctatggggttataggg

SEQ ID NO: 2904 - DNA, 23 bp, Homo sapiens
  source 1..23: mol_type = genomic DNA
tgtgtgggaaaccctgagaatgg

SEQ ID NO: 2905 - DNA, 23 bp, Homo sapiens
  source 1..23: mol_type = genomic DNA
ggtttccaacaagagccctccgg

SEQ ID NO: 2906 - DNA, 23 bp, Homo sapiens
  source 1..23: mol_type = genomic DNA
tctactcttgggcttattcgtgg

SEQ ID NO: 2907 - DNA, 23 bp, Homo sapiens
  source 1..23: mol_type = genomic DNA
agaaggtgtgaaagagaagtggg

SEQ ID NO: 2908 - DNA, 23 bp, Homo sapiens
  source 1..23: mol_type = genomic DNA
gtaaggattttgaaacttggagg

SEQ ID NO: 2909 - DNA, 23 bp, Homo sapiens
  source 1..23: mol_type = genomic DNA
aattcatgattttagttggaggg

SEQ ID NO: 2910 - DNA, 23 bp, Homo sapiens
  source 1..23: mol_type = genomic DNA
cagttcccattagtgaggaatgg

SEQ ID NO: 2911 - DNA, 23 bp, Homo sapiens
  source 1..23: mol_type = genomic DNA
ttatggattgtttgactggaggg

SEQ ID NO: 2912 - DNA, 23 bp, Homo sapiens
  source 1..23: mol_type = genomic DNA
cctgtctcctaaattttgcatgg

SEQ ID NO: 2913 - DNA, 23 bp, Homo sapiens
  source 1..23: mol_type = genomic DNA
acaaaagcttacattcactttgg

SEQ ID NO: 2914 - DNA, 23 bp, Homo sapiens
  source 1..23: mol_type = genomic DNA
acaagtctactggaagactttgg

SEQ ID NO: 2915 - DNA, 23 bp, Homo sapiens
  source 1..23: mol_type = genomic DNA
tcatcatccgggattcttgtagg

SEQ ID NO: 2916 - DNA, 23 bp, Homo sapiens
  source 1..23: mol_type = genomic DNA
ttttttttgtgtgtgttgggggg

SEQ ID NO: 2917 - DNA, 23 bp, Homo sapiens
  source 1..23: mol_type = genomic DNA
cagccagctttccagaaggctgg

SEQ ID NO: 2918 - DNA, 23 bp, Homo sapiens
  source 1..23: mol_type = genomic DNA
atgttcgtaactgagagttaggg

SEQ ID NO: 2919 - DNA, 23 bp, Homo sapiens
  source 1..23: mol_type = genomic DNA
tgtacataaaaaactggcctagg

SEQ ID NO: 2920 - DNA, 23 bp, Homo sapiens
  source 1..23: mol_type = genomic DNA
tgtcagggtcctggtgataatgg

SEQ ID NO: 2921 - DNA, 23 bp, Homo sapiens
  source 1..23: mol_type = genomic DNA
agaaacagacaagattactttgg

SEQ ID NO: 2922 - DNA, 23 bp, Homo sapiens
  source 1..23: mol_type = genomic DNA
tataatttttcctagaatgaggg

SEQ ID NO: 2923 - DNA, 23 bp, Homo sapiens
  source 1..23: mol_type = genomic DNA
tctctttagttaagtccaatggg

SEQ ID NO: 2924 - DNA, 23 bp, Homo sapiens
  source 1..23: mol_type = genomic DNA
tacgttatttagctcccttaggg

SEQ ID NO: 2925 - DNA, 23 bp, Homo sapiens
  source 1..23: mol_type = genomic DNA
tttttacctgagttgagaaaagg

SEQ ID NO: 2926 - DNA, 23 bp, Homo sapiens
  source 1..23: mol_type = genomic DNA
attcataagaaatttttcaatgg

SEQ ID NO: 2927 - DNA, 23 bp, Homo sapiens
  source 1..23: mol_type = genomic DNA
gagctaagtgctgacttaaaggg

SEQ ID NO: 2928 - DNA, 23 bp, Homo sapiens
  source 1..23: mol_type = genomic DNA
ttttcattcctaatgccctaagg

SEQ ID NO: 2929 - DNA, 23 bp, Homo sapiens
  source 1..23: mol_type = genomic DNA
cacttttagtattaagtagaggg

SEQ ID NO: 2930 - DNA, 23 bp, Homo sapiens
  source 1..23: mol_type = genomic DNA
tattgtagccagatctttggtgg

SEQ ID NO: 2931 - DNA, 23 bp, Homo sapiens
  source 1..23: mol_type = genomic DNA
ttaaaacgtgtatttaaaagtgg

SEQ ID NO: 2932 - DNA, 23 bp, Homo sapiens
  source 1..23: mol_type = genomic DNA
tgccttatactacctgactctgg

SEQ ID NO: 2933 - DNA, 23 bp, Homo sapiens
  source 1..23: mol_type = genomic DNA
cctaagcatcttttttcaagcgg

SEQ ID NO: 2934 - DNA, 23 bp, Homo sapiens
  source 1..23: mol_type = genomic DNA
cagaatcttcaacatacaaatgg

SEQ ID NO: 2935 - DNA, 23 bp, Homo sapiens
  source 1..23: mol_type = genomic DNA
atataatccatcttttaagaagg

SEQ ID NO: 2936 - DNA, 23 bp, Homo sapiens
  source 1..23: mol_type = genomic DNA
agatgacaagtgaatctcatagg

SEQ ID NO: 2937 - DNA, 23 bp, Homo sapiens
  source 1..23: mol_type = genomic DNA
gatttccaaccactttaacttgg

SEQ ID NO: 2938 - DNA, 23 bp, Homo sapiens
  source 1..23: mol_type = genomic DNA
tagcagtgctactaagtgaatgg

SEQ ID NO: 2939 - DNA, 23 bp, Homo sapiens
  source 1..23: mol_type = genomic DNA
tcatatggcaaactaaagaaagg

SEQ ID NO: 2940 - DNA, 23 bp, Homo sapiens
  source 1..23: mol_type = genomic DNA
gtgggaagtacaatagcaactgg

SEQ ID NO: 2941 - DNA, 23 bp, Homo sapiens
  source 1..23: mol_type = genomic DNA
gtatacaattggattctgtcagg

SEQ ID NO: 2942 - DNA, 23 bp, Homo sapiens
  source 1..23: mol_type = genomic DNA
tctttcacttaaaatagctctgg

SEQ ID NO: 2943 - DNA, 23 bp, Homo sapiens
  source 1..23: mol_type = genomic DNA
catatggcaaactaaagaaaggg

SEQ ID NO: 2944 - DNA, 23 bp, Homo sapiens
  source 1..23: mol_type = genomic DNA
ttaaaatatcttaagcagtcagg

SEQ ID NO: 2945 - DNA, 23 bp, Homo sapiens
  source 1..23: mol_type = genomic DNA
tgatatcctcagccaagtatagg

SEQ ID NO: 2946 - DNA, 23 bp, Homo sapiens
  source 1..23: mol_type = genomic DNA
tgctcccctcaaaagtcccttgg

SEQ ID NO: 2947 - DNA, 23 bp, Homo sapiens
  source 1..23: mol_type = genomic DNA
gtatccatccaagactgaaatgg

SEQ ID NO: 2948 - DNA, 23 bp, Homo sapiens
  source 1..23: mol_type = genomic DNA
agtttttccctttcactcatcgg

SEQ ID NO: 2949 - DNA, 23 bp, Homo sapiens
  source 1..23: mol_type = genomic DNA
tgaagaataaacaggcctttggg

SEQ ID NO: 2950 - DNA, 23 bp, Homo sapiens
  source 1..23: mol_type = genomic DNA
gggaagatcaaagaaaaatcagg

SEQ ID NO: 2951 - DNA, 23 bp, Homo sapiens
  source 1..23: mol_type = genomic DNA
tcgggcataaagcatttccttgg

SEQ ID NO: 2952 - DNA, 23 bp, Homo sapiens
  source 1..23: mol_type = genomic DNA
tcttacttaaaggactgattcgg

SEQ ID NO: 2953 - DNA, 23 bp, Homo sapiens
  source 1..23: mol_type = genomic DNA
tcagcactagcagcacttgttgg

SEQ ID NO: 2954 - DNA, 23 bp, Homo sapiens
  source 1..23: mol_type = genomic DNA
attactttgtcagtacttcaggg

SEQ ID NO: 2955 - DNA, 23 bp, Homo sapiens
  source 1..23: mol_type = genomic DNA
ttaaagccacatccactgatagg

SEQ ID NO: 2956 - DNA, 23 bp, Homo sapiens
  source 1..23: mol_type = genomic DNA
tgctaattaatggggacccatgg

SEQ ID NO: 2957 - DNA, 23 bp, Homo sapiens
  source 1..23: mol_type = genomic DNA
gcacactaaaaggcctatagagg

SEQ ID NO: 2958 - DNA, 23 bp, Homo sapiens
  source 1..23: mol_type = genomic DNA
tgagagagaagacttgcaaaagg

SEQ ID NO: 2959 - DNA, 23 bp, Homo sapiens
  source 1..23: mol_type = genomic DNA
attatttcctcttttcagactgg

SEQ ID NO: 2960 - DNA, 23 bp, Homo sapiens
  source 1..23: mol_type = genomic DNA
tgccagttatgggcttaagatgg

SEQ ID NO: 2961 - DNA, 23 bp, Homo sapiens
  source 1..23: mol_type = genomic DNA
acgtacaatgtcgttcttgaggg

SEQ ID NO: 2962 - DNA, 23 bp, Homo sapiens
  source 1..23: mol_type = genomic DNA
ttatgttgcaatttgaagacagg

SEQ ID NO: 2963 - DNA, 23 bp, Homo sapiens
  source 1..23: mol_type = genomic DNA
ttacagtcatagtaggttgtggg

SEQ ID NO: 2964 - DNA, 23 bp, Homo sapiens
  source 1..23: mol_type = genomic DNA
catgggacccgcctgttcagagg

SEQ ID NO: 2965 - DNA, 23 bp, Homo sapiens
  source 1..23: mol_type = genomic DNA
ataaatttacaaggggcctatgg

SEQ ID NO: 2966 - DNA, 23 bp, Homo sapiens
  source 1..23: mol_type = genomic DNA
cactccatcgtcaggtaagaagg

SEQ ID NO: 2967 - DNA, 23 bp, Homo sapiens
  source 1..23: mol_type = genomic DNA
aatcaggtcatggggctttgcgg

SEQ ID NO: 2968 - DNA, 23 bp, Homo sapiens
  source 1..23: mol_type = genomic DNA
atacttctttgcaaaccaaaagg

SEQ ID NO: 2969 - DNA, 23 bp, Homo sapiens
  source 1..23: mol_type = genomic DNA
gcctcctccaggaagatttgagg

SEQ ID NO: 2970 - DNA, 23 bp, Homo sapiens
  source 1..23: mol_type = genomic DNA
ctccagctgcatttatatagagg

SEQ ID NO: 2971 - DNA, 23 bp, Homo sapiens
  source 1..23: mol_type = genomic DNA
atttgaggatgatattcaacagg

SEQ ID NO: 2972 - DNA, 23 bp, Homo sapiens
  source 1..23: mol_type = genomic DNA
actagcatctgacagcctattgg

SEQ ID NO: 2973 - DNA, 23 bp, Homo sapiens
  source 1..23: mol_type = genomic DNA
gttattcattcagcaaaagaagg

SEQ ID NO: 2974 - DNA, 23 bp, Homo sapiens
  source 1..23: mol_type = genomic DNA
tatttggtcccactgatgaatgg

SEQ ID NO: 2975 - DNA, 23 bp, Homo sapiens
  source 1..23: mol_type = genomic DNA
tctagtctaaacaagtctactgg

SEQ ID NO: 2976 - DNA, 23 bp, Homo sapiens
  source 1..23: mol_type = genomic DNA
gcaacacatacaataaatgtagg

SEQ ID NO: 2977 - DNA, 23 bp, Homo sapiens
  source 1..23: mol_type = genomic DNA
gatcattcatccctaggaacagg

SEQ ID NO: 2978 - DNA, 23 bp, Homo sapiens
  source 1..23: mol_type = genomic DNA
cattttgatgaagcgatgtaggg

SEQ ID NO: 2979 - DNA, 23 bp, Homo sapiens
  source 1..23: mol_type = genomic DNA
tacttcactgggggcttgaaggg

SEQ ID NO: 2980 - DNA, 23 bp, Homo sapiens
  source 1..23: mol_type = genomic DNA
gtatgactctgctttattggagg

SEQ ID NO: 2981 - DNA, 23 bp, Homo sapiens
  source 1..23: mol_type = genomic DNA
aaacacacaggacaagaagatgg

SEQ ID NO: 2982 - DNA, 23 bp, Homo sapiens
  source 1..23: mol_type = genomic DNA
tatttaccaattactgacatagg

SEQ ID NO: 2983 - DNA, 23 bp, Homo sapiens
  source 1..23: mol_type = genomic DNA
ctacgcatgcatagaaaactagg

SEQ ID NO: 2984 - DNA, 23 bp, Homo sapiens
  source 1..23: mol_type = genomic DNA
tgcaagaaagatacagtctaggg

SEQ ID NO: 2985 - DNA, 23 bp, Homo sapiens
  source 1..23: mol_type = genomic DNA
attagggtatatttcccctctgg

SEQ ID NO: 2986 - DNA, 23 bp, Homo sapiens
  source 1..23: mol_type = genomic DNA
ctgatcatttatccttttagcgg

SEQ ID NO: 2987 - DNA, 23 bp, Homo sapiens
  source 1..23: mol_type = genomic DNA
tattctctcatctcataaagagg

SEQ ID NO: 2988 - DNA, 23 bp, Homo sapiens
  source 1..23: mol_type = genomic DNA
tcacttgtatttatacagaatgg

SEQ ID NO: 2989 - DNA, 23 bp, Homo sapiens
  source 1..23: mol_type = genomic DNA
ccaggaacatgctatatagctgg

SEQ ID NO: 2990 - DNA, 23 bp, Homo sapiens
  source 1..23: mol_type = genomic DNA
ctttattgtagcatgacttaggg

SEQ ID NO: 2991 - DNA, 23 bp, Homo sapiens
  source 1..23: mol_type = genomic DNA
tcagttcttacttcgtagaatgg

SEQ ID NO: 2992 - DNA, 23 bp, Homo sapiens
  source 1..23: mol_type = genomic DNA
atgagtttggtaagaaaaaacgg

SEQ ID NO: 2993 - DNA, 23 bp, Homo sapiens
  source 1..23: mol_type = genomic DNA
cctgctccataacaggcaatagg

SEQ ID NO: 2994 - DNA, 23 bp, Homo sapiens
  source 1..23: mol_type = genomic DNA
aaatgaacagactttggtactgg

SEQ ID NO: 2995 - DNA, 23 bp, Homo sapiens
  source 1..23: mol_type = genomic DNA
tgaataatattggttaatatggg

SEQ ID NO: 2996 - DNA, 23 bp, Homo sapiens
  source 1..23: mol_type = genomic DNA
agctctggattgtttaaggatgg

SEQ ID NO: 2997 - DNA, 23 bp, Homo sapiens
  source 1..23: mol_type = genomic DNA
tcacttaattaattaaagcctgg

SEQ ID NO: 2998 - DNA, 23 bp, Homo sapiens
  source 1..23: mol_type = genomic DNA
ataattgctgacatttaaaacgg

SEQ ID NO: 2999 - DNA, 23 bp, Homo sapiens
  source 1..23: mol_type = genomic DNA
agtccagttaaaggtagcttggg

SEQ ID NO: 3000 - DNA, 23 bp, Homo sapiens
  source 1..23: mol_type = genomic DNA
ttcttaagcacaattctgatagg

SEQ ID NO: 3001 - DNA, 23 bp, Homo sapiens
  source 1..23: mol_type = genomic DNA
acatttaaaatgaaaacaatggg

SEQ ID NO: 3002 - DNA, 23 bp, Homo sapiens
  source 1..23: mol_type = genomic DNA
tttacttgaaaactgttccctgg

SEQ ID NO: 3003 - DNA, 23 bp, Homo sapiens
  source 1..23: mol_type = genomic DNA
aataagtgataaataacaacagg

SEQ ID NO: 3004 - DNA, 23 bp, Homo sapiens
  source 1..23: mol_type = genomic DNA
ttcaatggcaaaatgaggcttgg

SEQ ID NO: 3005 - DNA, 23 bp, Homo sapiens
  source 1..23: mol_type = genomic DNA
ctttggcaataggattcaaatgg

SEQ ID NO: 3006 - DNA, 23 bp, Homo sapiens
  source 1..23: mol_type = genomic DNA
accataatgttgttgaagatggg

SEQ ID NO: 3007 - DNA, 23 bp, Homo sapiens
  source 1..23: mol_type = genomic DNA
gggcacagctaccaggaaaaggg

SEQ ID NO: 3008 - DNA, 23 bp, Homo sapiens
  source 1..23: mol_type = genomic DNA
gtgtggctctggttttcgccagg

SEQ ID NO: 3009 - DNA, 23 bp, Homo sapiens
  source 1..23: mol_type = genomic DNA
tttctttttcttactagtagagg

SEQ ID NO: 3010 - DNA, 23 bp, Homo sapiens
  source 1..23: mol_type = genomic DNA
taacagtattaagatcataaggg

SEQ ID NO: 3011 - DNA, 23 bp, Homo sapiens
  source 1..23: mol_type = genomic DNA
cattttttaatactcaaaatggg

SEQ ID NO: 3012 - DNA, 23 bp, Homo sapiens
  source 1..23: mol_type = genomic DNA
cttctcatatccctatgttcagg

SEQ ID NO: 3013 - DNA, 23 bp, Homo sapiens
  source 1..23: mol_type = genomic DNA
ctggagcatttagagtaaaaggg

SEQ ID NO: 3014 - DNA, 23 bp, Homo sapiens
  source 1..23: mol_type = genomic DNA
tgagaacacctcactattcacgg

SEQ ID NO: 3015 - DNA, 23 bp, Homo sapiens
  source 1..23: mol_type = genomic DNA
aacctcatcatatataatgatgg

SEQ ID NO: 3016 - DNA, 23 bp, Homo sapiens
  source 1..23: mol_type = genomic DNA
tcagctagaaagcagctaatggg

SEQ ID NO: 3017 - DNA, 23 bp, Homo sapiens
  source 1..23: mol_type = genomic DNA
tttctgtctgtgctaatacttgg

SEQ ID NO: 3018 - DNA, 23 bp, Homo sapiens
  source 1..23: mol_type = genomic DNA
actagccagaaggagcagtatgg

SEQ ID NO: 3019 - DNA, 23 bp, Homo sapiens
  source 1..23: mol_type = genomic DNA
tttttctgaatgttagtccatgg

SEQ ID NO: 3020 - DNA, 23 bp, Homo sapiens
  source 1..23: mol_type = genomic DNA
gcaaacgccacttctttctcagg

SEQ ID NO: 3021 - DNA, 23 bp, Homo sapiens
  source 1..23: mol_type = genomic DNA
tctgaacaggcgggtcccatggg

SEQ ID NO: 3022 - DNA, 23 bp, Homo sapiens
  source 1..23: mol_type = genomic DNA
ttggttagtttatcaacccctgg

SEQ ID NO: 3023 - DNA, 23 bp, Homo sapiens
  source 1..23: mol_type = genomic DNA
tgagcatgagtcttacagtatgg

SEQ ID NO: 3024 - DNA, 23 bp, Homo sapiens
  source 1..23: mol_type = genomic DNA
agtagcagaacttttgttggtgg

SEQ ID NO: 3025 - DNA, 23 bp, Homo sapiens
  source 1..23: mol_type = genomic DNA
ataactataccaaagtgttccgg

SEQ ID NO: 3026 - DNA, 23 bp, Homo sapiens
  source 1..23: mol_type = genomic DNA
agactagctcttattacccttgg

SEQ ID NO: 3027 - DNA, 23 bp, Homo sapiens
  source 1..23: mol_type = genomic DNA
gtaaattattttcatacaagtgg

SEQ ID NO: 3028 - DNA, 23 bp, Homo sapiens
  source 1..23: mol_type = genomic DNA
aatcccccaagagtgctctatgg

SEQ ID NO: 3029 - DNA, 23 bp, Homo sapiens
  source 1..23: mol_type = genomic DNA
ctgtgcctatcctaataagcagg

SEQ ID NO: 3030 - DNA, 23 bp, Homo sapiens
  source 1..23: mol_type = genomic DNA
tagaaggtgtgaaagagaagtgg

SEQ ID NO: 3031 - DNA, 23 bp, Homo sapiens
  source 1..23: mol_type = genomic DNA
cttaccacagatatattcctagg

SEQ ID NO: 3032 - DNA, 23 bp, Homo sapiens
  source 1..23: mol_type = genomic DNA
gcctagatcctgactgtcacagg

SEQ ID NO: 3033 - DNA, 23 bp, Homo sapiens
  source 1..23: mol_type = genomic DNA
tctgacttttagatgaaaagagg

SEQ ID NO: 3034 - DNA, 23 bp, Homo sapiens
  source 1..23: mol_type = genomic DNA
tgatatttgaagtcaagaaccgg

SEQ ID NO: 3035 - DNA, 23 bp, Homo sapiens
  source 1..23: mol_type = genomic DNA
taagtatcttaaaaccctaaagg

SEQ ID NO: 3036 - DNA, 23 bp, Homo sapiens
  source 1..23: mol_type = genomic DNA
tttcagacaagaaaagctttggg

SEQ ID NO: 3037 - DNA, 23 bp, Homo sapiens
  source 1..23: mol_type = genomic DNA
gcaaatctatctagaaaaaaggg

SEQ ID NO: 3038 - DNA, 23 bp, Homo sapiens
  source 1..23: mol_type = genomic DNA
aattttaaagggaattaagatgg

SEQ ID NO: 3039 - DNA, 23 bp, Homo sapiens
  source 1..23: mol_type = genomic DNA
gcatgtgtgataaataaattggg

SEQ ID NO: 3040 - DNA, 23 bp, Homo sapiens
  source 1..23: mol_type = genomic DNA
actctttgcagctcttcagctgg

SEQ ID NO: 3041 - DNA, 23 bp, Homo sapiens
  source 1..23: mol_type = genomic DNA
tttgtactatcagctatagatgg

SEQ ID NO: 3042 - DNA, 23 bp, Homo sapiens
  source 1..23: mol_type = genomic DNA
gagtctgtcactttaacaaatgg

SEQ ID NO: 3043 - DNA, 23 bp, Homo sapiens
  source 1..23: mol_type = genomic DNA
tgatgatgctgaggactagatgg

SEQ ID NO: 3044 - DNA, 23 bp, Homo sapiens
  source 1..23: mol_type = genomic DNA
ggaggccattgaacaatttgagg

SEQ ID NO: 3045 - DNA, 23 bp, Homo sapiens
  source 1..23: mol_type = genomic DNA
gtaggcagctgtatggaaacagg

SEQ ID NO: 3046 - DNA, 23 bp, Homo sapiens
  source 1..23: mol_type = genomic DNA
ttaattgtaatccttagccttgg

SEQ ID NO: 3047 - DNA, 23 bp, Homo sapiens
  source 1..23: mol_type = genomic DNA
aagaatccttcctttcataaggg

SEQ ID NO: 3048 - DNA, 23 bp, Homo sapiens
  source 1..23: mol_type = genomic DNA
atgttgtcctttttcttgcatgg

SEQ ID NO: 3049 - DNA, 23 bp, Homo sapiens
  source 1..23: mol_type = genomic DNA
tcttgcctgaaattggtaagagg

SEQ ID NO: 3050 - DNA, 23 bp, Homo sapiens
  source 1..23: mol_type = genomic DNA
tgaactatctttatcaaatgtgg

SEQ ID NO: 3051 - DNA, 23 bp, Homo sapiens
  source 1..23: mol_type = genomic DNA
ctaaaatctcatcagctcctagg

SEQ ID NO: 3052 - DNA, 23 bp, Homo sapiens
  source 1..23: mol_type = genomic DNA
gagattttaacatattagaatgg

SEQ ID NO: 3053 - DNA, 23 bp, Homo sapiens
  source 1..23: mol_type = genomic DNA
gctaccctcttctctcttcgtgg

SEQ ID NO: 3054 - DNA, 23 bp, Homo sapiens
  source 1..23: mol_type = genomic DNA
cttgccctctgatgtccagctgg

SEQ ID NO: 3055 - DNA, 23 bp, Homo sapiens
  source 1..23: mol_type = genomic DNA
ttaacgatgactgaattgatagg

SEQ ID NO: 3056 - DNA, 23 bp, Homo sapiens
  source 1..23: mol_type = genomic DNA
gtaactcctggtacacttgtagg

SEQ ID NO: 3057 - DNA, 23 bp, Homo sapiens
  source 1..23: mol_type = genomic DNA
gatgctggcttccatcctactgg

SEQ ID NO: 3058 - DNA, 23 bp, Homo sapiens
  source 1..23: mol_type = genomic DNA
ttaaatgtctgaaaatggattgg

SEQ ID NO: 3059 - DNA, 23 bp, Homo sapiens
  source 1..23: mol_type = genomic DNA
aagaagctatagaaatagattgg

SEQ ID NO: 3060 - DNA, 23 bp, Homo sapiens
  source 1..23: mol_type = genomic DNA
tatctcttatatgcatcagttgg

SEQ ID NO: 3061 - DNA, 23 bp, Homo sapiens
  source 1..23: mol_type = genomic DNA
atccaattgtcatttctaagagg

SEQ ID NO: 3062 - DNA, 23 bp, Homo sapiens
  source 1..23: mol_type = genomic DNA
taccagattgaggatattagagg

SEQ ID NO: 3063 - DNA, 23 bp, Homo sapiens
  source 1..23: mol_type = genomic DNA
ggtgtatgagataaaacataagg

SEQ ID NO: 3064 - DNA, 23 bp, Homo sapiens
  source 1..23: mol_type = genomic DNA
aaaggtgatgtaggtgtgaaggg

SEQ ID NO: 3065 - DNA, 23 bp, Homo sapiens
  source 1..23: mol_type = genomic DNA
gcccataactggcaaccaacagg

SEQ ID NO: 3066 - DNA, 23 bp, Homo sapiens
  source 1..23: mol_type = genomic DNA
ggatgtatgccctcagagaatgg

SEQ ID NO: 3067 - DNA, 23 bp, Homo sapiens
  source 1..23: mol_type = genomic DNA
ataaggacgtgtctgcttgtggg

SEQ ID NO: 3068 - DNA, 23 bp, Homo sapiens
  source 1..23: mol_type = genomic DNA
tccttatgagatgcatgccctgg

SEQ ID NO: 3069 - DNA, 23 bp, Homo sapiens
  source 1..23: mol_type = genomic DNA
gctgagcacaattaccattacgg

SEQ ID NO: 3070 - DNA, 23 bp, Homo sapiens
  source 1..23: mol_type = genomic DNA
ttttgttctctggagggaggtgg

SEQ ID NO: 3071 - DNA, 23 bp, Homo sapiens
  source 1..23: mol_type = genomic DNA
cgattaggtttggtggttggagg

SEQ ID NO: 3072 - DNA, 23 bp, Homo sapiens
  source 1..23: mol_type = genomic DNA
gtcagccagaaaatatatatagg

SEQ ID NO: 3073 - DNA, 23 bp, Homo sapiens
  source 1..23: mol_type = genomic DNA
ggtcagataattgagttagaagg

SEQ ID NO: 3074 - DNA, 23 bp, Homo sapiens
  source 1..23: mol_type = genomic DNA
tttttttccttgttgagtaaagg

SEQ ID NO: 3075 - DNA, 23 bp, Homo sapiens
  source 1..23: mol_type = genomic DNA
cagtctatgcagagattcaatgg

SEQ ID NO: 3076 - DNA, 23 bp, Homo sapiens
  source 1..23: mol_type = genomic DNA
cactctcttggaaatgagaaagg

SEQ ID NO: 3077 - DNA, 23 bp, Homo sapiens
  source 1..23: mol_type = genomic DNA
tggcctagggaataaataatggg

SEQ ID NO: 3078 - DNA, 23 bp, Homo sapiens
  source 1..23: mol_type = genomic DNA
tctgccgctgatggtttgttcgg

SEQ ID NO: 3079 - DNA, 23 bp, Homo sapiens
  source 1..23: mol_type = genomic DNA
ctcttcctcttttctcacatggg

SEQ ID NO: 3080 - DNA, 23 bp, Homo sapiens
  source 1..23: mol_type = genomic DNA
tttcaaatgatccttttgcttgg

SEQ ID NO: 3081 - DNA, 23 bp, Homo sapiens
  source 1..23: mol_type = genomic DNA
tttctcaatgaactgagtaatgg

SEQ ID NO: 3082 - DNA, 23 bp, Homo sapiens
  source 1..23: mol_type = genomic DNA
cctcaaatagattataccttggg

SEQ ID NO: 3083 - DNA, 23 bp, Homo sapiens
  source 1..23: mol_type = genomic DNA
atatgagagtctctgaataaggg

SEQ ID NO: 3084 - DNA, 23 bp, Homo sapiens
  source 1..23: mol_type = genomic DNA
taatactttggaaattgaaaggg

SEQ ID NO: 3085 - DNA, 23 bp, Homo sapiens
  source 1..23: mol_type = genomic DNA
acctccctccagagaacaaaagg

SEQ ID NO: 3086 - DNA, 23 bp, Homo sapiens
  source 1..23: mol_type = genomic DNA
agtgtggctgggagtctacctgg

SEQ ID NO: 3087 - DNA, 23 bp, Homo sapiens
  source 1..23: mol_type = genomic DNA
tgtttccactgggaatatatagg

SEQ ID NO: 3088 - DNA, 23 bp, Homo sapiens
  source 1..23: mol_type = genomic DNA
gtatgcatatgtacataaatcgg

SEQ ID NO: 3089 - DNA, 23 bp, Homo sapiens
  source 1..23: mol_type = genomic DNA
gattgacacccgtagcctatggg

SEQ ID NO: 3090 - DNA, 23 bp, Homo sapiens
  source 1..23: mol_type = genomic DNA
ccagtaggtgggtcactcattgg

SEQ ID NO: 3091 - DNA, 23 bp, Homo sapiens
  source 1..23: mol_type = genomic DNA
acaagtgcagattttagccttgg

SEQ ID NO: 3092 - DNA, 23 bp, Homo sapiens
  source 1..23: mol_type = genomic DNA
ttttttcatatatcatcaatggg

SEQ ID NO: 3093 - DNA, 23 bp, Homo sapiens
  source 1..23: mol_type = genomic DNA
gattatcatgtgcgtttccatgg

SEQ ID NO: 3094 - DNA, 23 bp, Homo sapiens
  source 1..23: mol_type = genomic DNA
aagctgaaaggtaaacaaatcgg

SEQ ID NO: 3095 - DNA, 23 bp, Homo sapiens
  source 1..23: mol_type = genomic DNA
atagaactttctatgtatagagg

SEQ ID NO: 3096 - DNA, 23 bp, Homo sapiens
  source 1..23: mol_type = genomic DNA
ccagagaaaatgaagctaaaggg

SEQ ID NO: 3097 - DNA, 23 bp, Homo sapiens
  source 1..23: mol_type = genomic DNA
tatcacaaaaagagaaataaggg

SEQ ID NO: 3098 - DNA, 23 bp, Homo sapiens
  source 1..23: mol_type = genomic DNA
catagtatgcagattttaagtgg

SEQ ID NO: 3099 - DNA, 23 bp, Homo sapiens
  source 1..23: mol_type = genomic DNA
aattccctggttttgctccccgg

SEQ ID NO: 3100 - DNA, 23 bp, Homo sapiens
  source 1..23: mol_type = genomic DNA
gtttattattgataatctaaagg

SEQ ID NO: 3101 - DNA, 23 bp, Homo sapiens
  source 1..23: mol_type = genomic DNA
agatgaacgtttcttttcctagg

SEQ ID NO: 3102 - DNA, 23 bp, Homo sapiens
  source 1..23: mol_type = genomic DNA
tgtaaccacttacacactaatgg

SEQ ID NO: 3103 - DNA, 23 bp, Homo sapiens
  source 1..23: mol_type = genomic DNA
gtacagtgttctttatcgtatgg

SEQ ID NO: 3104 - DNA, 23 bp, Homo sapiens
  source 1..23: mol_type = genomic DNA
gttcccagattcctgttcctagg

SEQ ID NO: 3105 - DNA, 23 bp, Homo sapiens
  source 1..23: mol_type = genomic DNA
gctgtgaaggttcaataaatagg

SEQ ID NO: 3106 - DNA, 23 bp, Homo sapiens
  source 1..23: mol_type = genomic DNA
acgttcccatataatagaaatgg

SEQ ID NO: 3107 - DNA, 23 bp, Homo sapiens
  source 1..23: mol_type = genomic DNA
ccactgggcatgctcagaatagg

SEQ ID NO: 3108 - DNA, 23 bp, Homo sapiens
  source 1..23: mol_type = genomic DNA
tctgccatacataggtcttaggg

SEQ ID NO: 3109 - DNA, 23 bp, Homo sapiens
  source 1..23: mol_type = genomic DNA
agtgtctcctttgatagtgttgg

SEQ ID NO: 3110 - DNA, 23 bp, Homo sapiens
  source 1..23: mol_type = genomic DNA
aatagttaagatgttgtatgagg

SEQ ID NO: 3111 - DNA, 23 bp, Homo sapiens
  source 1..23: mol_type = genomic DNA
attgattgataagttatgccagg

SEQ ID NO: 3112 - DNA, 23 bp, Homo sapiens
  source 1..23: mol_type = genomic DNA
ggaggttgacaagggaaaaaggg

SEQ ID NO: 3113 - DNA, 23 bp, Homo sapiens
  source 1..23: mol_type = genomic DNA
tttaactcaccctttctaagagg

SEQ ID NO: 3114 - DNA, 23 bp, Homo sapiens
  source 1..23: mol_type = genomic DNA
ctacagcaagatgttcccttagg

SEQ ID NO: 3115 - DNA, 23 bp, Homo sapiens
  source 1..23: mol_type = genomic DNA
gcatgtcatatacctggttatgg

SEQ ID NO: 3116 - DNA, 23 bp, Homo sapiens
  source 1..23: mol_type = genomic DNA
cctgcttgagctattgttggagg

SEQ ID NO: 3117 - DNA, 23 bp, Homo sapiens
  source 1..23: mol_type = genomic DNA
ttaatattgtcaaaaaagcttgg

SEQ ID NO: 3118 - DNA, 23 bp, Homo sapiens
  source 1..23: mol_type = genomic DNA
ctactttcatatttttaggttgg

SEQ ID NO: 3119 - DNA, 23 bp, Homo sapiens
  source 1..23: mol_type = genomic DNA
aagacctccctctcttagctggg

SEQ ID NO: 3120 - DNA, 23 bp, Homo sapiens
  source 1..23: mol_type = genomic DNA
gggaaatctgagagtacaattgg

SEQ ID NO: 3121 - DNA, 23 bp, Homo sapiens
  source 1..23: mol_type = genomic DNA
agttaacctttccatcctcttgg

SEQ ID NO: 3122 - DNA, 23 bp, Homo sapiens
  source 1..23: mol_type = genomic DNA
acgatatgtgcaaaaattcaggg

SEQ ID NO: 3123 - DNA, 23 bp, Homo sapiens
  source 1..23: mol_type = genomic DNA
tctagttaaggtttttcagcagg

SEQ ID NO: 3124 - DNA, 23 bp, Homo sapiens
  source 1..23: mol_type = genomic DNA
tcttgctatgtatggccaaacgg

SEQ ID NO: 3125 - DNA, 23 bp, Homo sapiens
  source 1..23: mol_type = genomic DNA
aggtagctcacagaataatcagg

SEQ ID NO: 3126 - DNA, 23 bp, Homo sapiens
  source 1..23: mol_type = genomic DNA
ttacattgtaatgcttgtaatgg

SEQ ID NO: 3127 - DNA, 23 bp, Homo sapiens
  source 1..23: mol_type = genomic DNA
ttttctatcacagatttacatgg

SEQ ID NO: 3128 - DNA, 23 bp, Homo sapiens
  source 1..23: mol_type = genomic DNA
gaaggcctagtgaggaaagatgg

SEQ ID NO: 3129 - DNA, 23 bp, Homo sapiens
  source 1..23: mol_type = genomic DNA
tgacagaaacgctctttcaatgg

SEQ ID NO: 3130 - DNA, 23 bp, Homo sapiens
  source 1..23: mol_type = genomic DNA
ataaaatgaaataaaagcttcgg

SEQ ID NO: 3131 - DNA, 23 bp, Homo sapiens
  source 1..23: mol_type = genomic DNA
ctatcatttgcaaagcactatgg

SEQ ID NO: 3132 - DNA, 23 bp, Homo sapiens
  source 1..23: mol_type = genomic DNA
gaatacacattagaaacaattgg

SEQ ID NO: 3133 - DNA, 23 bp, Homo sapiens
  source 1..23: mol_type = genomic DNA
tgtaaatcctctcattaagatgg

SEQ ID NO: 3134 - DNA, 23 bp, Homo sapiens
  source 1..23: mol_type = genomic DNA
tcttgaatggtcacttaaaacgg

SEQ ID NO: 3135 - DNA, 23 bp, Homo sapiens
  source 1..23: mol_type = genomic DNA
gtaatactttggaaattgaaagg

SEQ ID NO: 3136 - DNA, 23 bp, Homo sapiens
  source 1..23: mol_type = genomic DNA
tagattatagaagtttacattgg

SEQ ID NO: 3137 - DNA, 23 bp, Homo sapiens
  source 1..23: mol_type = genomic DNA
cactagctacactattttggagg

SEQ ID NO: 3138 - DNA, 23 bp, Homo sapiens
  source 1..23: mol_type = genomic DNA
agagtcagtcttttagaaaaggg

SEQ ID NO: 3139 - DNA, 23 bp, Homo sapiens
  source 1..23: mol_type = genomic DNA
agacagctgattatataagttgg

SEQ ID NO: 3140 - DNA, 23 bp, Homo sapiens
  source 1..23: mol_type = genomic DNA
attagtcacgtacatacatatgg

SEQ ID NO: 3141 - DNA, 23 bp, Homo sapiens
  source 1..23: mol_type = genomic DNA
agtgcacaagtcaacccgtttgg

SEQ ID NO: 3142 - DNA, 23 bp, Homo sapiens
  source 1..23: mol_type = genomic DNA
gagtgaaagtgaggcattgaggg

SEQ ID NO: 3143 - DNA, 23 bp, Homo sapiens
  source 1..23: mol_type = genomic DNA
ttttttttcctgagagtaagtgg

SEQ ID NO: 3144 - DNA, 23 bp, Homo sapiens
  source 1..23: mol_type = genomic DNA
gtggctttggtaaggtaagttgg

SEQ ID NO: 3145 - DNA, 23 bp, Homo sapiens
  source 1..23: mol_type = genomic DNA
gatatttgaggcaaatccttcgg

SEQ ID NO: 3146 - DNA, 23 bp, Homo sapiens
  source 1..23: mol_type = genomic DNA
cagccatgttaataattagtagg

SEQ ID NO: 3147 - DNA, 23 bp, Homo sapiens
  source 1..23: mol_type = genomic DNA
caataatgttcctcttttagcgg

SEQ ID NO: 3148 - DNA, 23 bp, Homo sapiens
  source 1..23: mol_type = genomic DNA
cctactaaacgaattataaaggg

SEQ ID NO: 3149 - DNA, 23 bp, Homo sapiens
  source 1..23: mol_type = genomic DNA
aaatcatcagtaatacatatagg

SEQ ID NO: 3150 - DNA, 23 bp, Homo sapiens
  source 1..23: mol_type = genomic DNA
gtaaacattttatagacaaaagg

SEQ ID NO: 3151 - DNA, 23 bp, Homo sapiens
  source 1..23: mol_type = genomic DNA
atcattgtggccagctcccaggg

SEQ ID NO: 3152 - DNA, 23 bp, Homo sapiens
  source 1..23: mol_type = genomic DNA
tactttctttaatctacaaaggg

SEQ ID NO: 3153 - DNA, 23 bp, Homo sapiens
  source 1..23: mol_type = genomic DNA
tgataaggttaacaatccttggg

SEQ ID NO: 3154 - DNA, 23 bp, Homo sapiens
  source 1..23: mol_type = genomic DNA
tttgaattactatttttcactgg

SEQ ID NO: 3155 - DNA, 23 bp, Homo sapiens
  source 1..23: mol_type = genomic DNA
gtttaggcttgcttcatttgcgg

SEQ ID NO: 3156 - DNA, 23 bp, Homo sapiens
  source 1..23: mol_type = genomic DNA
ttcattacatggataagcattgg

SEQ ID NO: 3157 - DNA, 23 bp, Homo sapiens
  source 1..23: mol_type = genomic DNA
tgtttatttggaattccccttgg

SEQ ID NO: 3158 - DNA, 23 bp, Homo sapiens
  source 1..23: mol_type = genomic DNA
gcttctcttattcagactgttgg

SEQ ID NO: 3159 - DNA, 23 bp, Homo sapiens
  source 1..23: mol_type = genomic DNA
aggtttgtactactacatatagg

SEQ ID NO: 3160 - DNA, 23 bp, Homo sapiens
  source 1..23: mol_type = genomic DNA
aagcctatcaaaagtgaaatggg

SEQ ID NO: 3161 - DNA, 23 bp, Homo sapiens
  source 1..23: mol_type = genomic DNA
aggaattccaagcatataatggg

SEQ ID NO: 3162 - DNA, 23 bp, Homo sapiens
  source 1..23: mol_type = genomic DNA
attagaaccaaatttggaatggg

SEQ ID NO: 3163 - DNA, 23 bp, Homo sapiens
  source 1..23: mol_type = genomic DNA
gatagcttaaagctcagaaatgg

SEQ ID NO: 3164 - DNA, 23 bp, Homo sapiens
  source 1..23: mol_type = genomic DNA
ctaaatgcatgtacaaactaagg

SEQ ID NO: 3165 - DNA, 23 bp, Homo sapiens
  source 1..23: mol_type = genomic DNA
agtatagtgctttataaaaaggg

SEQ ID NO: 3166 - DNA, 23 bp, Homo sapiens
  source 1..23: mol_type = genomic DNA
gtaagacaaaactcattaaaggg

SEQ ID NO: 3167 - DNA, 23 bp, Homo sapiens
  source 1..23: mol_type = genomic DNA
gatggagcttgccttccatcagg

SEQ ID NO: 3168 - DNA, 23 bp, Homo sapiens
  source 1..23: mol_type = genomic DNA
tttacagtcatagtaggttgtgg

SEQ ID NO: 3169 - DNA, 23 bp, Homo sapiens
  source 1..23: mol_type = genomic DNA
gttataacacaggtaactatagg

SEQ ID NO: 3170 - DNA, 23 bp, Homo sapiens
  source 1..23: mol_type = genomic DNA
ccatagttacttttaaaagaagg

SEQ ID NO: 3171 - DNA, 23 bp, Homo sapiens
  source 1..23: mol_type = genomic DNA
ttattgtatctatataagattgg

SEQ ID NO: 3172 - DNA, 23 bp, Homo sapiens
  source 1..23: mol_type = genomic DNA
ataaagaatgaactatctatagg

SEQ ID NO: 3173 - DNA, 23 bp, Homo sapiens
  source 1..23: mol_type = genomic DNA
gtggcattcatgttagccttagg

SEQ ID NO: 3174 - DNA, 23 bp, Homo sapiens
  source 1..23: mol_type = genomic DNA
ccaaataagtagtaaacaaaggg

SEQ ID NO: 3175 - DNA, 23 bp, Homo sapiens
  source 1..23: mol_type = genomic DNA
tgtagtagcagaacttttgttgg

SEQ ID NO: 3176 - DNA, 23 bp, Homo sapiens
  source 1..23: mol_type = genomic DNA
tattttataagttatttgaatgg

SEQ ID NO: 3177 - DNA, 23 bp, Homo sapiens
  source 1..23: mol_type = genomic DNA
ggataaaaacagaatgttgatgg

SEQ ID NO: 3178 - DNA, 23 bp, Homo sapiens
  source 1..23: mol_type = genomic DNA
gatttgaaggaggctagaatagg

SEQ ID NO: 3179 - DNA, 23 bp, Homo sapiens
  source 1..23: mol_type = genomic DNA
aaagttatggtacaattcctagg

SEQ ID NO: 3180 - DNA, 23 bp, Homo sapiens
  source 1..23: mol_type = genomic DNA
tttctaggcaatctgctagcagg

SEQ ID NO: 3181 - DNA, 23 bp, Homo sapiens
  source 1..23: mol_type = genomic DNA
gtctgtgtttgaattaagaatgg

SEQ ID NO: 3182 - DNA, 23 bp, Homo sapiens
  source 1..23: mol_type = genomic DNA
ggactttttccctatcagtcagg

SEQ ID NO: 3183 - DNA, 23 bp, Homo sapiens
  source 1..23: mol_type = genomic DNA
gatttcgttgacccttaactagg

SEQ ID NO: 3184 - DNA, 23 bp, Homo sapiens
  source 1..23: mol_type = genomic DNA
ttaatgaatttttatccccctgg

SEQ ID NO: 3185 - DNA, 23 bp, Homo sapiens
  source 1..23: mol_type = genomic DNA
gcggaaagccggggtaaccgtgg

SEQ ID NO: 3186 - DNA, 23 bp, Homo sapiens
  source 1..23: mol_type = genomic DNA
ccatagtgcctgacaaaacctgg

SEQ ID NO: 3187 - DNA, 23 bp, Homo sapiens
  source 1..23: mol_type = genomic DNA
ttataagcattcttctgcctggg

SEQ ID NO: 3188 - DNA, 23 bp, Homo sapiens
  source 1..23: mol_type = genomic DNA
ttaaaacagaaataaagtttcgg

SEQ ID NO: 3189 - DNA, 23 bp, Homo sapiens
  source 1..23: mol_type = genomic DNA
tatatctgacctttattgacagg

SEQ ID NO: 3190 - DNA, 23 bp, Homo sapiens
  source 1..23: mol_type = genomic DNA
tgtagctatcacttacttcgtgg

SEQ ID NO: 3191 - DNA, 23 bp, Homo sapiens
  source 1..23: mol_type = genomic DNA
ctgtctgtttggagtgggcaggg

SEQ ID NO: 3192 - DNA, 23 bp, Homo sapiens
  source 1..23: mol_type = genomic DNA
tgtgaactcctccaccttgaggg

SEQ ID NO: 3193 - DNA, 23 bp, Homo sapiens
  source 1..23: mol_type = genomic DNA
tcagtgatattcagtatgattgg

SEQ ID NO: 3194 - DNA, 23 bp, Homo sapiens
  source 1..23: mol_type = genomic DNA
ggagatacagagttttatgttgg

SEQ ID NO: 3195 - DNA, 23 bp, Homo sapiens
  source 1..23: mol_type = genomic DNA
attcatgtgcaacctaaatacgg

SEQ ID NO: 3196 - DNA, 23 bp, Homo sapiens
  source 1..23: mol_type = genomic DNA
gataattacttcactctacatgg

SEQ ID NO: 3197 - DNA, 23 bp, Homo sapiens
  source 1..23: mol_type = genomic DNA
atactgtttttagttgcaaatgg

SEQ ID NO: 3198 - DNA, 23 bp, Homo sapiens
  source 1..23: mol_type = genomic DNA
tagcaaagaggagtaggtattgg

SEQ ID NO: 3199 - DNA, 23 bp, Homo sapiens
  source 1..23: mol_type = genomic DNA
ttagctctcaaaagcacattggg

SEQ ID NO: 3200 - DNA, 23 bp, Homo sapiens
  source 1..23: mol_type = genomic DNA
tattttccccccatgggtagtgg

SEQ ID NO: 3201 - DNA, 23 bp, Homo sapiens
  source 1..23: mol_type = genomic DNA
atagactgtaggaagtataatgg

SEQ ID NO: 3202 - DNA, 23 bp, Homo sapiens
  source 1..23: mol_type = genomic DNA
acacagggcctggattataaggg

SEQ ID NO: 3203 - DNA, 23 bp, Homo sapiens
  source 1..23: mol_type = genomic DNA
cactcttcctgtgacccgactgg

SEQ ID NO: 3204 - DNA, 23 bp, Homo sapiens
  source 1..23: mol_type = genomic DNA
agcctattgtagctgcctaatgg

SEQ ID NO: 3205 - DNA, 23 bp, Homo sapiens
  source 1..23: mol_type = genomic DNA
tttaggacatatttagaaagtgg

SEQ ID NO: 3206 - DNA, 23 bp, Homo sapiens
  source 1..23: mol_type = genomic DNA
ctccttctcgcggggctcgaggg

SEQ ID NO: 3207 - DNA, 23 bp, Homo sapiens
  source 1..23: mol_type = genomic DNA
gtacacaccccgtctctaatggg

SEQ ID NO: 3208 - DNA, 23 bp, Homo sapiens
  source 1..23: mol_type = genomic DNA
aaatatatcttgacagcaaatgg

SEQ ID NO: 3209 - DNA, 23 bp, Homo sapiens
  source 1..23: mol_type = genomic DNA
tttacactatgtttccaaaccgg

SEQ ID NO: 3210 - DNA, 23 bp, Homo sapiens
  source 1..23: mol_type = genomic DNA
gtgcactcatttatgcaaactgg

SEQ ID NO: 3211 - DNA, 23 bp, Homo sapiens
  source 1..23: mol_type = genomic DNA
ggcagcggtggctaatacttagg

SEQ ID NO: 3212 - DNA, 23 bp, Homo sapiens
  source 1..23: mol_type = genomic DNA
tttttgtaggagcttgggctagg

SEQ ID NO: 3213 - DNA, 23 bp, Homo sapiens
  source 1..23: mol_type = genomic DNA
gtcagtgctgaaaacatgtttgg

SEQ ID NO: 3214 - DNA, 23 bp, Homo sapiens
  source 1..23: mol_type = genomic DNA
ataataggttattggaaggtagg

SEQ ID NO: 3215 - DNA, 23 bp, Homo sapiens
  source 1..23: mol_type = genomic DNA
gcagtggtgattccaatcattgg

SEQ ID NO: 3216 - DNA, 23 bp, Homo sapiens
  source 1..23: mol_type = genomic DNA
gtgcacactcaagctgttgatgg

SEQ ID NO: 3217 - DNA, 23 bp, Homo sapiens
  source 1..23: mol_type = genomic DNA
gcttcataaatttcttttggtgg

SEQ ID NO: 3218 - DNA, 23 bp, Homo sapiens
  source 1..23: mol_type = genomic DNA
acaagttacagagggttaaacgg

SEQ ID NO: 3219 - DNA, 23 bp, Homo sapiens
  source 1..23: mol_type = genomic DNA
ggctggctacacaccttcatagg

SEQ ID NO: 3220 - DNA, 23 bp, Homo sapiens
  source 1..23: mol_type = genomic DNA
gctacttaagagaagggcttggg

SEQ ID NO: 3221 - DNA, 23 bp, Homo sapiens
  source 1..23: mol_type = genomic DNA
aagacggttgatatttcttaggg

SEQ ID NO: 3222 - DNA, 23 bp, Homo sapiens
  source 1..23: mol_type = genomic DNA
gtacatggattcaggcatattgg

SEQ ID NO: 3223 - DNA, 23 bp, Homo sapiens
  source 1..23: mol_type = genomic DNA
gtaggttgtgggagagatgctgg

SEQ ID NO: 3224 - DNA, 23 bp, Homo sapiens
  source 1..23: mol_type = genomic DNA
gtacaaacaccataaccaaatgg

SEQ ID NO: 3225 - DNA, 23 bp, Homo sapiens
  source 1..23: mol_type = genomic DNA
ggtacttgtcaggtttataaggg

SEQ ID NO: 3226 - DNA, 23 bp, Homo sapiens
  source 1..23: mol_type = genomic DNA
gataaaagtcaacagctgattgg

SEQ ID NO: 3227 - DNA, 23 bp, Homo sapiens
  source 1..23: mol_type = genomic DNA
acaacaaaatgaacagactttgg

SEQ ID NO: 3228 - DNA, 23 bp, Homo sapiens
  source 1..23: mol_type = genomic DNA
gagtctacctggattattgatgg

SEQ ID NO: 3229 - DNA, 23 bp, Homo sapiens
  source 1..23: mol_type = genomic DNA
agatctttgcatgcaggcattgg

SEQ ID NO: 3230 - DNA, 23 bp, Homo sapiens
  source 1..23: mol_type = genomic DNA
ttggctgctgacccattcatggg

SEQ ID NO: 3231 - DNA, 23 bp, Homo sapiens
  source 1..23: mol_type = genomic DNA
aatggcctcctattgaccttagg

SEQ ID NO: 3232 - DNA, 23 bp, Homo sapiens
  source 1..23: mol_type = genomic DNA
gattattctgtgagctaccttgg

SEQ ID NO: 3233 - DNA, 23 bp, Homo sapiens
  source 1..23: mol_type = genomic DNA
aagactagtcagatctctaatgg

SEQ ID NO: 3234 - DNA, 23 bp, Homo sapiens
  source 1..23: mol_type = genomic DNA
tctttcctattgaaggctatggg

SEQ ID NO: 3235 - DNA, 23 bp, Homo sapiens
  source 1..23: mol_type = genomic DNA
aatcaaaggctgattttaagtgg

SEQ ID NO: 3236 - DNA, 23 bp, Homo sapiens
  source 1..23: mol_type = genomic DNA
attagtgtattttttcagtccgg

SEQ ID NO: 3237 - DNA, 23 bp, Homo sapiens
  source 1..23: mol_type = genomic DNA
ataggagacgtccaaatgatagg

SEQ ID NO: 3238 - DNA, 23 bp, Homo sapiens
  source 1..23: mol_type = genomic DNA
tactaccctagagagcaattagg

SEQ ID NO: 3239 - DNA, 23 bp, Homo sapiens
  source 1..23: mol_type = genomic DNA
ttagttgttaatttaagtaatgg

SEQ ID NO: 3240 - DNA, 23 bp, Homo sapiens
  source 1..23: mol_type = genomic DNA
aggcaaacggaaactgcatttgg

SEQ ID NO: 3241 - DNA, 23 bp, Homo sapiens
  source 1..23: mol_type = genomic DNA
tttatattccttagtccctcagg

SEQ ID NO: 3242 - DNA, 23 bp, Homo sapiens
  source 1..23: mol_type = genomic DNA
attgaagtttatcaattagcagg

SEQ ID NO: 3243 - DNA, 23 bp, Homo sapiens
  source 1..23: mol_type = genomic DNA
gaatttatcattcttctgaatgg

SEQ ID NO: 3244 - DNA, 23 bp, Homo sapiens
  source 1..23: mol_type = genomic DNA
ctaaattatctgattttcatggg

SEQ ID NO: 3245 - DNA, 23 bp, Homo sapiens
  source 1..23: mol_type = genomic DNA
tgttgtggttctgggtactaagg

SEQ ID NO: 3246 - DNA, 23 bp, Homo sapiens
  source 1..23: mol_type = genomic DNA
gagagcttcttattgagaaaggg

SEQ ID NO: 3247 - DNA, 23 bp, Homo sapiens
  source 1..23: mol_type = genomic DNA
attatagtacgcactaacttagg

SEQ ID NO: 3248 - DNA, 23 bp, Homo sapiens
  source 1..23: mol_type = genomic DNA
atgacatgcagcattttaaaggg

SEQ ID NO: 3249 - DNA, 23 bp, Homo sapiens
  source 1..23: mol_type = genomic DNA
tttcttgctggcttctggcgtgg

SEQ ID NO: 3250 - DNA, 23 bp, Homo sapiens
  source 1..23: mol_type = genomic DNA
cattttgatgtcattaccatagg

SEQ ID NO: 3251 - DNA, 23 bp, Homo sapiens
  source 1..23: mol_type = genomic DNA
ggcttgaatgtgacattgactgg

SEQ ID NO: 3252 - DNA, 23 bp, Homo sapiens
  source 1..23: mol_type = genomic DNA
cttgtctgtgttacagcaatggg

SEQ ID NO: 3253 - DNA, 23 bp, Homo sapiens
  source 1..23: mol_type = genomic DNA
agtttcttagttttgagctatgg

SEQ ID NO: 3254 - DNA, 23 bp, Homo sapiens
  source 1..23: mol_type = genomic DNA
tcttgatctttgaatgaagttgg

SEQ ID NO: 3255 - DNA, 23 bp, Homo sapiens
  source 1..23: mol_type = genomic DNA
ctactaaatggaacattgaatgg

SEQ ID NO: 3256 - DNA, 23 bp, Homo sapiens
  source 1..23: mol_type = genomic DNA
aatcattgtggccagctcccagg

SEQ ID NO: 3257 - DNA, 23 bp, Homo sapiens
  source 1..23: mol_type = genomic DNA
ttttattgccaaagtttcctagg

SEQ ID NO: 3258 - DNA, 23 bp, Homo sapiens
  source 1..23: mol_type = genomic DNA
caaatgttatgtttgttgccagg

SEQ ID NO: 3259 - DNA, 23 bp, Homo sapiens
  source 1..23: mol_type = genomic DNA
acagtcctttttatacatagtgg

SEQ ID NO: 3260 - DNA, 23 bp, Homo sapiens
  source 1..23: mol_type = genomic DNA
aactaactcattgtttaaagagg

SEQ ID NO: 3261 - DNA, 23 bp, Homo sapiens
  source 1..23: mol_type = genomic DNA
tttaatgtttaaattttgaatgg

SEQ ID NO: 3262 - DNA, 23 bp, Homo sapiens
  source 1..23: mol_type = genomic DNA
ggattccttctcttacaaactgg

SEQ ID NO: 3263 - DNA, 23 bp, Homo sapiens
  source 1..23: mol_type = genomic DNA
aactcaggcatcattcagattgg

SEQ ID NO: 3264 - DNA, 23 bp, Homo sapiens
  source 1..23: mol_type = genomic DNA
tgtatcagcttgtttcagatagg

SEQ ID NO: 3265 - DNA, 23 bp, Homo sapiens
  source 1..23: mol_type = genomic DNA
tcaaacttgctgtaaccctatgg

SEQ ID NO: 3266 - DNA, 23 bp, Homo sapiens
  source 1..23: mol_type = genomic DNA
tgaattctaatgactgcaatggg

SEQ ID NO: 3267 - DNA, 23 bp, Homo sapiens
  source 1..23: mol_type = genomic DNA
tcaaacttgaccatataaatcgg

SEQ ID NO: 3268 - DNA, 23 bp, Homo sapiens
  source 1..23: mol_type = genomic DNA
ttatttctcatattgactaaagg

SEQ ID NO: 3269 - DNA, 23 bp, Homo sapiens
  source 1..23: mol_type = genomic DNA
acatgggcctgatctcactatgg

SEQ ID NO: 3270 - DNA, 23 bp, Homo sapiens
  source 1..23: mol_type = genomic DNA
tatagactctgattgagaaatgg

SEQ ID NO: 3271 - DNA, 23 bp, Homo sapiens
  source 1..23: mol_type = genomic DNA
tctacagttcttttgccctctgg

SEQ ID NO: 3272 - DNA, 23 bp, Homo sapiens
  source 1..23: mol_type = genomic DNA
ataaaacctcagtatgaaaacgg

SEQ ID NO: 3273 - DNA, 23 bp, Homo sapiens
  source 1..23: mol_type = genomic DNA
ttatcaggatatgtttataaggg

SEQ ID NO: 3274 - DNA, 23 bp, Homo sapiens
  source 1..23: mol_type = genomic DNA
cattaactgtttctatcaaaggg

SEQ ID NO: 3275 - DNA, 23 bp, Homo sapiens
  source 1..23: mol_type = genomic DNA
cacaacatttagcaacagattgg

SEQ ID NO: 3276 - DNA, 23 bp, Homo sapiens
  source 1..23: mol_type = genomic DNA
gacgatggagtgcagaatatggg

SEQ ID NO: 3277 - DNA, 23 bp, Homo sapiens
  source 1..23: mol_type = genomic DNA
gtaggggatttggggttgaatgg

SEQ ID NO: 3278 - DNA, 23 bp, Homo sapiens
  source 1..23: mol_type = genomic DNA
agaaaaaagaaaaaaataagagg

SEQ ID NO: 3279 - DNA, 23 bp, Homo sapiens
  source 1..23: mol_type = genomic DNA
tcccagatctgagtcctgtaggg

SEQ ID NO: 3280 - DNA, 23 bp, Homo sapiens
  source 1..23: mol_type = genomic DNA
ggggccactagtgtaaaaaaagg

SEQ ID NO: 3281 - DNA, 23 bp, Homo sapiens
  source 1..23: mol_type = genomic DNA
ggccatctcacaaagctcattgg

SEQ ID NO: 3282 - DNA, 23 bp, Homo sapiens
  source 1..23: mol_type = genomic DNA
ctccgttacacgtttacaaaggg

SEQ ID NO: 3283 - DNA, 23 bp, Homo sapiens
  source 1..23: mol_type = genomic DNA
tcttgtggatttacattgccagg

SEQ ID NO: 3284 - DNA, 23 bp, Homo sapiens
  source 1..23: mol_type = genomic DNA
tattgacctttaatataaaacgg

SEQ ID NO: 3285 - DNA, 23 bp, Homo sapiens
  source 1..23: mol_type = genomic DNA
ttatactttgttacttcaaaggg

SEQ ID NO: 3286 - DNA, 23 bp, Homo sapiens
  source 1..23: mol_type = genomic DNA
aactttttattgtcactaagagg

SEQ ID NO: 3287 - DNA, 23 bp, Homo sapiens
  source 1..23: mol_type = genomic DNA
ggaagcccatagccttcaatagg

SEQ ID NO: 3288 - DNA, 23 bp, Homo sapiens
  source 1..23: mol_type = genomic DNA
acatcttatgacaaatcaatagg

SEQ ID NO: 3289 - DNA, 23 bp, Homo sapiens
  source 1..23: mol_type = genomic DNA
gtgctgctgcccctcagcatggg

SEQ ID NO: 3290 - DNA, 23 bp, Homo sapiens
  source 1..23: mol_type = genomic DNA
cctgctctcgtctttataagagg

SEQ ID NO: 3291 - DNA, 23 bp, Homo sapiens
  source 1..23: mol_type = genomic DNA
gcttattttaaatttaatgatgg

SEQ ID NO: 3292 - DNA, 23 bp, Homo sapiens
  source 1..23: mol_type = genomic DNA
tatgaaatatgtcaaacaactgg

SEQ ID NO: 3293 - DNA, 23 bp, Homo sapiens
  source 1..23: mol_type = genomic DNA
gttcccatatgaacactgtttgg

SEQ ID NO: 3294 - DNA, 23 bp, Homo sapiens
  source 1..23: mol_type = genomic DNA
gctaaaatgtaagagatgtttgg

SEQ ID NO: 3295 - DNA, 23 bp, Homo sapiens
  source 1..23: mol_type = genomic DNA
cactttcatttattcgggggagg

SEQ ID NO: 3296 - DNA, 23 bp, Homo sapiens
  source 1..23: mol_type = genomic DNA
agaactgtagtttctccatcagg

SEQ ID NO: 3297 - DNA, 23 bp, Homo sapiens
  source 1..23: mol_type = genomic DNA
ctacttctcagaagctctgttgg

SEQ ID NO: 3298 - DNA, 23 bp, Homo sapiens
  source 1..23: mol_type = genomic DNA
agacagggcttagctatattcgg

SEQ ID NO: 3299 - DNA, 23 bp, Homo sapiens
  source 1..23: mol_type = genomic DNA
cattgaatgatatttacaattgg

SEQ ID NO: 3300 - DNA, 23 bp, Homo sapiens
  source 1..23: mol_type = genomic DNA
cagtttatctcctaaatatgagg

SEQ ID NO: 3301 - DNA, 23 bp, Homo sapiens
  source 1..23: mol_type = genomic DNA
ttaagatatttagtatatagtgg

SEQ ID NO: 3302 - DNA, 23 bp, Homo sapiens
  source 1..23: mol_type = genomic DNA
aatcaaggctaagctgcattagg

SEQ ID NO: 3303 - DNA, 23 bp, Homo sapiens
  source 1..23: mol_type = genomic DNA
ctccatattcctaagccaacagg

SEQ ID NO: 3304 - DNA, 23 bp, Homo sapiens
  source 1..23: mol_type = genomic DNA
ccctgcagaattgggattgaggg

SEQ ID NO: 3305 - DNA, 23 bp, Homo sapiens
  source 1..23: mol_type = genomic DNA
ggatttcagttggaaggcattgg

SEQ ID NO: 3306 - DNA, 23 bp, Homo sapiens
  source 1..23: mol_type = genomic DNA
ctttttgctgatttccctgttgg

SEQ ID NO: 3307 - DNA, 23 bp, Homo sapiens
  source 1..23: mol_type = genomic DNA
caaaatgtattgctgtgaaaggg

SEQ ID NO: 3308 - DNA, 23 bp, Homo sapiens
  source 1..23: mol_type = genomic DNA
ggacatggaacttacttgttcgg

SEQ ID NO: 3309 - DNA, 23 bp, Homo sapiens
  source 1..23: mol_type = genomic DNA
caatatttctttaggtcaaaggg

SEQ ID NO: 3310 - DNA, 23 bp, Homo sapiens
  source 1..23: mol_type = genomic DNA
gcaacagaatagcagattaaggg

SEQ ID NO: 3311 - DNA, 23 bp, Homo sapiens
  source 1..23: mol_type = genomic DNA
cctcctccaggaagatttgaggg

SEQ ID NO: 3312 - DNA, 23 bp, Homo sapiens
  source 1..23: mol_type = genomic DNA
tgttctttacacttttcaaatgg

SEQ ID NO: 3313 - DNA, 23 bp, Homo sapiens
  source 1..23: mol_type = genomic DNA
tgtaagagaaaagtaccaacagg

SEQ ID NO: 3314 - DNA, 23 bp, Homo sapiens
  source 1..23: mol_type = genomic DNA
tattaaataatcaaacaagttgg

SEQ ID NO: 3315 - DNA, 23 bp, Homo sapiens
  source 1..23: mol_type = genomic DNA
gtatcagcttgtttcagataggg

SEQ ID NO: 3316 - DNA, 23 bp, Homo sapiens
  source 1..23: mol_type = genomic DNA
tcaccggccattttcctttgagg

SEQ ID NO: 3317 - DNA, 23 bp, Homo sapiens
  source 1..23: mol_type = genomic DNA
gcaaacattttgatcaaagttgg

SEQ ID NO: 3318 - DNA, 23 bp, Homo sapiens
  source 1..23: mol_type = genomic DNA
ttaggtactgtcatagtgttggg

SEQ ID NO: 3319 - DNA, 23 bp, Homo sapiens
  source 1..23: mol_type = genomic DNA
ttatcagtttgattcattaaggg

SEQ ID NO: 3320 - DNA, 23 bp, Homo sapiens
  source 1..23: mol_type = genomic DNA
tcctttgcatctaatatgaatgg

SEQ ID NO: 3321 - DNA, 23 bp, Homo sapiens
  source 1..23: mol_type = genomic DNA
ttttaacttaaatcattgaatgg

SEQ ID NO: 3322 - DNA, 23 bp, Homo sapiens
  source 1..23: mol_type = genomic DNA
ggaagtgtgaataaaagttaggg

SEQ ID NO: 3323 - DNA, 23 bp, Homo sapiens
  source 1..23: mol_type = genomic DNA
gctctttactccaacagaatagg

SEQ ID NO: 3324 - DNA, 23 bp, Homo sapiens
  source 1..23: mol_type = genomic DNA
tattatggatttacaaaatgagg

SEQ ID NO: 3325 - DNA, 23 bp, Homo sapiens
  source 1..23: mol_type = genomic DNA
ttaatttcctccaaagccttggg

SEQ ID NO: 3326 - DNA, 23 bp, Homo sapiens
  source 1..23: mol_type = genomic DNA
attatattaaaaaactagattgg

SEQ ID NO: 3327 - DNA, 23 bp, Homo sapiens
  source 1..23: mol_type = genomic DNA
aaaatatccctgattatcatagg

SEQ ID NO: 3328 - DNA, 23 bp, Homo sapiens
  source 1..23: mol_type = genomic DNA
gtaacagacacaaggcttaaggg

SEQ ID NO: 3329 - DNA, 23 bp, Homo sapiens
  source 1..23: mol_type = genomic DNA
tttaatttcctccaaagccttgg

SEQ ID NO: 3330 - DNA, 23 bp, Homo sapiens
  source 1..23: mol_type = genomic DNA
tttgccccggagcccggcattgg

SEQ ID NO: 3331 - DNA, 23 bp, Homo sapiens
  source 1..23: mol_type = genomic DNA
taagtattagttctgttggttgg

SEQ ID NO: 3332 - DNA, 23 bp, Homo sapiens
  source 1..23: mol_type = genomic DNA
ttagaaagctaattttatatggg

SEQ ID NO: 3333 - DNA, 23 bp, Homo sapiens
  source 1..23: mol_type = genomic DNA
ctctctactgaagtgattgaagg

SEQ ID NO: 3334 - DNA, 23 bp, Homo sapiens
  source 1..23: mol_type = genomic DNA
cacattacttggaaattaagtgg

SEQ ID NO: 3335 - DNA, 23 bp, Homo sapiens
  source 1..23: mol_type = genomic DNA
gttaaaagggagccagaataggg

SEQ ID NO: 3336 - DNA, 23 bp, Homo sapiens
  source 1..23: mol_type = genomic DNA
catcggtctctaaataaacttgg

SEQ ID NO: 3337 - DNA, 23 bp, Homo sapiens
  source 1..23: mol_type = genomic DNA
caagcactgttggttttcatagg

SEQ ID NO: 3338 - DNA, 23 bp, Homo sapiens
  source 1..23: mol_type = genomic DNA
ctgtgttttgatagttaaaaggg

SEQ ID NO: 3339 - DNA, 23 bp, Homo sapiens
  source 1..23: mol_type = genomic DNA
atatttagcaaaagtcataaagg

SEQ ID NO: 3340 - DNA, 23 bp, Homo sapiens
  source 1..23: mol_type = genomic DNA
tgccagggagatgaaaattaggg

SEQ ID NO: 3341 - DNA, 23 bp, Homo sapiens
  source 1..23: mol_type = genomic DNA
ttataagccggtctcacaattgg

SEQ ID NO: 3342 - DNA, 23 bp, Homo sapiens
  source 1..23: mol_type = genomic DNA
tgtatcttttttttccaaaacgg

SEQ ID NO: 3343 - DNA, 23 bp, Homo sapiens
  source 1..23: mol_type = genomic DNA
gtaaaatctgattttctaagtgg

SEQ ID NO: 3344 - DNA, 23 bp, Homo sapiens
  source 1..23: mol_type = genomic DNA
ctttttatagtggtggggggagg

SEQ ID NO: 3345 - DNA, 23 bp, Homo sapiens
  source 1..23: mol_type = genomic DNA
actcagttataggaagtaacagg

SEQ ID NO: 3346 - DNA, 23 bp, Homo sapiens
  source 1..23: mol_type = genomic DNA
aaaacactaacacatcataatgg

SEQ ID NO: 3347 - DNA, 23 bp, Homo sapiens
  source 1..23: mol_type = genomic DNA
ctcattactctttaaccaaaagg

SEQ ID NO: 3348 - DNA, 23 bp, Homo sapiens
  source 1..23: mol_type = genomic DNA
tgttcattaatgactggctctgg

SEQ ID NO: 3349 - DNA, 23 bp, Homo sapiens
  source 1..23: mol_type = genomic DNA
tacattctcatttcattacatgg

SEQ ID NO: 3350 - DNA, 23 bp, Homo sapiens
  source 1..23: mol_type = genomic DNA
tggtgtctagcaaagttaaaggg

SEQ ID NO: 3351 - DNA, 23 bp, Homo sapiens
  source 1..23: mol_type = genomic DNA
gtatagaactttgtattgtatgg

SEQ ID NO: 3352 - DNA, 23 bp, Homo sapiens
  source 1..23: mol_type = genomic DNA
gtattatatgtaagtctcttcgg

SEQ ID NO: 3353 - DNA, 23 bp, Homo sapiens
  source 1..23: mol_type = genomic DNA
aatttactctcaaattaagttgg

SEQ ID NO: 3354 - DNA, 23 bp, Homo sapiens
  source 1..23: mol_type = genomic DNA
gctctcccgcacaatggcattgg

SEQ ID NO: 3355 - DNA, 23 bp, Homo sapiens
  source 1..23: mol_type = genomic DNA
atttttttagtgcagtgtttggg

SEQ ID NO: 3356 - DNA, 23 bp, Homo sapiens
  source 1..23: mol_type = genomic DNA
gtaaaataaatatttagaatggg

SEQ ID NO: 3357 - DNA, 23 bp, Homo sapiens
  source 1..23: mol_type = genomic DNA
ctgttgttccttagtattgaggg

SEQ ID NO: 3358 - DNA, 23 bp, Homo sapiens
  source 1..23: mol_type = genomic DNA
gaactggagttcaatttgttcgg

SEQ ID NO: 3359 - DNA, 23 bp, Homo sapiens
  source 1..23: mol_type = genomic DNA
atacagtagtcagttgaaatggg

SEQ ID NO: 3360 - DNA, 23 bp, Homo sapiens
  source 1..23: mol_type = genomic DNA
cctgttcatgtatttttgaatgg

SEQ ID NO: 3361 - DNA, 23 bp, Homo sapiens
  source 1..23: mol_type = genomic DNA
tgttgatcagtctcaccttatgg

SEQ ID NO: 3362 - DNA, 23 bp, Homo sapiens
  source 1..23: mol_type = genomic DNA
ctatgtaatacagaatctttcgg

SEQ ID NO: 3363 - DNA, 23 bp, Homo sapiens
  source 1..23: mol_type = genomic DNA
gaagtaatcaaccttggaatagg

SEQ ID NO: 3364 - DNA, 23 bp, Homo sapiens
  source 1..23: mol_type = genomic DNA
atataaattatacatttaagagg

SEQ ID NO: 3365 - DNA, 23 bp, Homo sapiens
  source 1..23: mol_type = genomic DNA
cttttcatgacttttcccattgg

SEQ ID NO: 3366 - DNA, 23 bp, Homo sapiens
  source 1..23: mol_type = genomic DNA
tcaagttgtttcctgggtgtggg

SEQ ID NO: 3367 - DNA, 23 bp, Homo sapiens
  source 1..23: mol_type = genomic DNA
tattttttaaacagatcaacagg

SEQ ID NO: 3368 - DNA, 23 bp, Homo sapiens
  source 1..23: mol_type = genomic DNA
aatgcatttcaataaatatgagg

SEQ ID NO: 3369 - DNA, 23 bp, Homo sapiens
  source 1..23: mol_type = genomic DNA
ggccacacttggaattgaaatgg

SEQ ID NO: 3370 - DNA, 23 bp, Homo sapiens
  source 1..23: mol_type = genomic DNA
ttacagctttgtgaaacaattgg

SEQ ID NO: 3371 - DNA, 23 bp, Homo sapiens
  source 1..23: mol_type = genomic DNA
gtatttcaggatttcacatcagg

SEQ ID NO: 3372 - DNA, 23 bp, Homo sapiens
  source 1..23: mol_type = genomic DNA
ttagtcttatccatcttgcttgg

SEQ ID NO: 3373 - DNA, 23 bp, Homo sapiens
  source 1..23: mol_type = genomic DNA
gttttaatctgttatactgcagg

SEQ ID NO: 3374 - DNA, 23 bp, Homo sapiens
  source 1..23: mol_type = genomic DNA
accgtcagagtaagtcttaaggg

SEQ ID NO: 3375 - DNA, 23 bp, Homo sapiens
  source 1..23: mol_type = genomic DNA
tgagccttctttaatggtgctgg

SEQ ID NO: 3376 - DNA, 23 bp, Homo sapiens
  source 1..23: mol_type = genomic DNA
atgtttctcaaggcaggttaggg

SEQ ID NO: 3377 - DNA, 23 bp, Homo sapiens
  source 1..23: mol_type = genomic DNA
ccaagaactgcagctctacttgg

SEQ ID NO: 3378 - DNA, 23 bp, Homo sapiens
  source 1..23: mol_type = genomic DNA
tgataaatgaggtcagatattgg

SEQ ID NO: 3379 - DNA, 23 bp, Homo sapiens
  source 1..23: mol_type = genomic DNA
acttattgttggctttaaaaggg

SEQ ID NO: 3380 - DNA, 23 bp, Homo sapiens
  source 1..23: mol_type = genomic DNA
cgaaggagacaattcacaaaagg

SEQ ID NO: 3381 - DNA, 23 bp, Homo sapiens
  source 1..23: mol_type = genomic DNA
aactatctattaatatcattcgg

SEQ ID NO: 3382 - DNA, 23 bp, Homo sapiens
  source 1..23: mol_type = genomic DNA
ataataatactgatctctattgg

SEQ ID NO: 3383 - DNA, 23 bp, Homo sapiens
  source 1..23: mol_type = genomic DNA
tagtgaacctgcaaatcaatagg

SEQ ID NO: 3384 - DNA, 23 bp, Homo sapiens
  source 1..23: mol_type = genomic DNA
ctaactcttaaccattttgaggg

SEQ ID NO: 3385 - DNA, 23 bp, Homo sapiens
  source 1..23: mol_type = genomic DNA
gtgcatttgcccctagttaaggg

SEQ ID NO: 3386 - DNA, 23 bp, Homo sapiens
  source 1..23: mol_type = genomic DNA
gcaagaaatttcatgtagttggg

SEQ ID NO: 3387 - DNA, 23 bp, Homo sapiens
  source 1..23: mol_type = genomic DNA
gcttttgtcaagctaaaatctgg

SEQ ID NO: 3388 - DNA, 23 bp, Homo sapiens
  source 1..23: mol_type = genomic DNA
tcagggcattcagatctatcagg

SEQ ID NO: 3389 - DNA, 23 bp, Homo sapiens
  source 1..23: mol_type = genomic DNA
gggaaattactaatgaatgttgg

SEQ ID NO: 3390 - DNA, 23 bp, Homo sapiens
  source 1..23: mol_type = genomic DNA
actggcactttttagctgtaagg

SEQ ID NO: 3391 - DNA, 23 bp, Homo sapiens
  source 1..23: mol_type = genomic DNA
ccttgatcatattttctacaagg

SEQ ID NO: 3392 - DNA, 23 bp, Homo sapiens
  source 1..23: mol_type = genomic DNA
tttctagccattctgacaattgg

SEQ ID NO: 3393 - DNA, 23 bp, Homo sapiens
  source 1..23: mol_type = genomic DNA
ccaaaacaaatcagtttaagagg

SEQ ID NO: 3394 - DNA, 23 bp, Homo sapiens
  source 1..23: mol_type = genomic DNA
cagaaaatgtatctttaaaaggg

SEQ ID NO: 3395 - DNA, 23 bp, Homo sapiens
  source 1..23: mol_type = genomic DNA
cctggggttatcaagatactagg

SEQ ID NO: 3396 - DNA, 23 bp, Homo sapiens
  source 1..23: mol_type = genomic DNA
ttttgttctgaaattttccttgg

SEQ ID NO: 3397 - DNA, 23 bp, Homo sapiens
  source 1..23: mol_type = genomic DNA
gtaattgtttcacatttaagagg

SEQ ID NO: 3398 - DNA, 23 bp, Homo sapiens
  source 1..23: mol_type = genomic DNA
ttgcaaccgtaatctgataaagg

SEQ ID NO: 3399 - DNA, 23 bp, Homo sapiens
  source 1..23: mol_type = genomic DNA
tttctcatggtacttaactaagg

SEQ ID NO: 3400 - DNA, 23 bp, Homo sapiens
  source 1..23: mol_type = genomic DNA
gcttaggtatttcctcataaggg

SEQ ID NO: 3401 - DNA, 23 bp, Homo sapiens
  source 1..23: mol_type = genomic DNA
ttcagttgtattagtggcagtgg

SEQ ID NO: 3402 - DNA, 23 bp, Homo sapiens
  source 1..23: mol_type = genomic DNA
gggggcgtggggccaaacagagg

SEQ ID NO: 3403 - DNA, 23 bp, Homo sapiens
  source 1..23: mol_type = genomic DNA
ggaaattatgtgacaccagctgg

SEQ ID NO: 3404 - DNA, 23 bp, Homo sapiens
  source 1..23: mol_type = genomic DNA
acttagatttgttaaatatgagg

SEQ ID NO: 3405 - DNA, 23 bp, Homo sapiens
  source 1..23: mol_type = genomic DNA
aggtccttatgggtgtttgatgg

SEQ ID NO: 3406 - DNA, 23 bp, Homo sapiens
  source 1..23: mol_type = genomic DNA
catttgcaaaacaatttaagagg

SEQ ID NO: 3407 - DNA, 23 bp, Homo sapiens
  source 1..23: mol_type = genomic DNA
ggtagatgtatataaggtttggg

SEQ ID NO: 3408 - DNA, 23 bp, Homo sapiens
  source 1..23: mol_type = genomic DNA
gccactgcagtcctgaaggttgg

SEQ ID NO: 3409 - DNA, 23 bp, Homo sapiens
  source 1..23: mol_type = genomic DNA
cacatttcccaaggctttggagg

SEQ ID NO: 3410 - DNA, 23 bp, Homo sapiens
  source 1..23: mol_type = genomic DNA
ttttttctaaaacagtagattgg

SEQ ID NO: 3411 - DNA, 23 bp, Homo sapiens
  source 1..23: mol_type = genomic DNA
actccaattgttataaaagaagg

SEQ ID NO: 3412 - DNA, 23 bp, Homo sapiens
  source 1..23: mol_type = genomic DNA
tttaatgatattggaaaaagagg

SEQ ID NO: 3413 - DNA, 23 bp, Homo sapiens
  source 1..23: mol_type = genomic DNA
cttccaacagagattttagttgg

SEQ ID NO: 3414 - DNA, 23 bp, Homo sapiens
  source 1..23: mol_type = genomic DNA
agtttaatatatttgatactagg

SEQ ID NO: 3415 - DNA, 23 bp, Homo sapiens
  source 1..23: mol_type = genomic DNA
aaaagaaaattattgtataaggg

SEQ ID NO: 3416 - DNA, 23 bp, Homo sapiens
  source 1..23: mol_type = genomic DNA
cacttgtaatccatccttaaggg

SEQ ID NO: 3417 - DNA, 23 bp, Homo sapiens
  source 1..23: mol_type = genomic DNA
tgatttcttcaaaggcctgctgg

SEQ ID NO: 3418 - DNA, 23 bp, Homo sapiens
  source 1..23: mol_type = genomic DNA
gaaccccattcctcactaatggg

SEQ ID NO: 3419 - DNA, 23 bp, Homo sapiens
  source 1..23: mol_type = genomic DNA
ttaatctatgatgaaggaaatgg

SEQ ID NO: 3420 - DNA, 23 bp, Homo sapiens
  source 1..23: mol_type = genomic DNA
aagctgattgattcattaagagg

SEQ ID NO: 3421 - DNA, 23 bp, Homo sapiens
  source 1..23: mol_type = genomic DNA
gtttgtttatttgtttctgcagg

SEQ ID NO: 3422 - DNA, 23 bp, Homo sapiens
  source 1..23: mol_type = genomic DNA
agaaaattatctttaaagaaagg

SEQ ID NO: 3423 - DNA, 23 bp, Homo sapiens
  source 1..23: mol_type = genomic DNA
tctgagctttaagctatcattgg

SEQ ID NO: 3424 - DNA, 23 bp, Homo sapiens
  source 1..23: mol_type = genomic DNA
ttatatgcatatatacagttagg

SEQ ID NO: 3425 - DNA, 23 bp, Homo sapiens
  source 1..23: mol_type = genomic DNA
tagactttatggaggaagattgg

SEQ ID NO: 3426 - DNA, 23 bp, Homo sapiens
  source 1..23: mol_type = genomic DNA
aagatttctgaatgtaagaaagg

SEQ ID NO: 3427 - DNA, 23 bp, Homo sapiens
  source 1..23: mol_type = genomic DNA
ccatatgatctaaaatctattgg

SEQ ID NO: 3428 - DNA, 23 bp, Homo sapiens
  source 1..23: mol_type = genomic DNA
atacagtgatctcttttaaaggg

SEQ ID NO: 3429 - DNA, 23 bp, Homo sapiens
  source 1..23: mol_type = genomic DNA
atatgctcatgagcttcctttgg

SEQ ID NO: 3430 - DNA, 23 bp, Homo sapiens
  source 1..23: mol_type = genomic DNA
ggaaagatttgaaaattcattgg

SEQ ID NO: 3431 - DNA, 23 bp, Homo sapiens
  source 1..23: mol_type = genomic DNA
accagtggttgacagaagtatgg

SEQ ID NO: 3432 - DNA, 23 bp, Homo sapiens
  source 1..23: mol_type = genomic DNA
agatggaagccagcatcaatagg

SEQ ID NO: 3433 - DNA, 23 bp, Homo sapiens
  source 1..23: mol_type = genomic DNA
gtatcttcaccccaaccttcagg

SEQ ID NO: 3434 - DNA, 23 bp, Homo sapiens
  source 1..23: mol_type = genomic DNA
aagcttttgtgcaaattagttgg

SEQ ID NO: 3435 - DNA, 23 bp, Homo sapiens
  source 1..23: mol_type = genomic DNA
gcctccccttatttttatgtagg

SEQ ID NO: 3436 - DNA, 23 bp, Homo sapiens
  source 1..23: mol_type = genomic DNA
gcgtaatgaaaaacgatagaagg

SEQ ID NO: 3437 - DNA, 23 bp, Homo sapiens
  source 1..23: mol_type = genomic DNA
tattttgcaacagtataataggg

SEQ ID NO: 3438 - DNA, 23 bp, Homo sapiens
  source 1..23: mol_type = genomic DNA
ggaccaacacagaaatatatagg

SEQ ID NO: 3439 - DNA, 23 bp, Homo sapiens
  source 1..23: mol_type = genomic DNA
aagcaaatcatcagacttaaggg

SEQ ID NO: 3440 - DNA, 23 bp, Homo sapiens
  source 1..23: mol_type = genomic DNA
gaagagctagaggattcctttgg

SEQ ID NO: 3441 - DNA, 23 bp, Homo sapiens
  source 1..23: mol_type = genomic DNA
actgtagacgggtaaataaaagg

SEQ ID NO: 3442 - DNA, 23 bp, Homo sapiens
  source 1..23: mol_type = genomic DNA
ttaaggcttttataatcattcgg

SEQ ID NO: 3443 - DNA, 23 bp, Homo sapiens
  source 1..23: mol_type = genomic DNA
tgaggaaagctgggttttagtgg

SEQ ID NO: 3444 - DNA, 23 bp, Homo sapiens
  source 1..23: mol_type = genomic DNA
accacaagtgaaaagcagtatgg

SEQ ID NO: 3445 - DNA, 23 bp, Homo sapiens
  source 1..23: mol_type = genomic DNA
gtttttgtggattcactgcttgg

SEQ ID NO: 3446 - DNA, 23 bp, Homo sapiens
  source 1..23: mol_type = genomic DNA
cccttgtctgatttcagtaaagg

SEQ ID NO: 3447 - DNA, 23 bp, Homo sapiens
  source 1..23: mol_type = genomic DNA
catggttgcctattgacttaggg

SEQ ID NO: 3448 - DNA, 23 bp, Homo sapiens
  source 1..23: mol_type = genomic DNA
gtgcctgctttatctgtgcttgg

SEQ ID NO: 3449 - DNA, 23 bp, Homo sapiens
  source 1..23: mol_type = genomic DNA
gaaactctgttcctgtaaacagg

SEQ ID NO: 3450 - DNA, 23 bp, Homo sapiens
  source 1..23: mol_type = genomic DNA
ctttgtattttgtcgatgatagg

SEQ ID NO: 3451 - DNA, 23 bp, Homo sapiens
  source 1..23: mol_type = genomic DNA
aatctcaattgtttgccaaatgg

SEQ ID NO: 3452 - DNA, 23 bp, Homo sapiens
  source 1..23: mol_type = genomic DNA
ccaagactattacaataaaacgg

SEQ ID NO: 3453 - DNA, 23 bp, Homo sapiens
  source 1..23: mol_type = genomic DNA
aatttgcatgaatatacaaatgg

SEQ ID NO: 3454 - DNA, 23 bp, Homo sapiens
  source 1..23: mol_type = genomic DNA
aggaggctctttcacttttgcgg

SEQ ID NO: 3455 - DNA, 23 bp, Homo sapiens
  source 1..23: mol_type = genomic DNA
ctaaacaattttcagtgtaaagg

SEQ ID NO: 3456 - DNA, 23 bp, Homo sapiens
  source 1..23: mol_type = genomic DNA
cctcaaataattagagcaacagg

SEQ ID NO: 3457 - DNA, 23 bp, Homo sapiens
  source 1..23: mol_type = genomic DNA
tgatatgtcaggccagtaacagg

SEQ ID NO: 3458 - DNA, 23 bp, Homo sapiens
  source 1..23: mol_type = genomic DNA
atagtactgctcgtgtactatgg

SEQ ID NO: 3459 - DNA, 23 bp, Homo sapiens
  source 1..23: mol_type = genomic DNA
cactataaaagaacagttaaggg

SEQ ID NO: 3460 - DNA, 23 bp, Homo sapiens
  source 1..23: mol_type = genomic DNA
cctgttgctctaattatttgagg

SEQ ID NO: 3461 - DNA, 23 bp, Homo sapiens
  source 1..23: mol_type = genomic DNA
ccatgacagcatgtgaagatagg

SEQ ID NO: 3462 - DNA, 23 bp, Homo sapiens
  source 1..23: mol_type = genomic DNA
cactccctgttcaccaaatacgg

SEQ ID NO: 3463 - DNA, 23 bp, Homo sapiens
  source 1..23: mol_type = genomic DNA
gctttttccttcttaaaagatgg

SEQ ID NO: 3464 - DNA, 23 bp, Homo sapiens
  source 1..23: mol_type = genomic DNA
tggctctcaaaagatagtttggg

SEQ ID NO: 3465 - DNA, 23 bp, Homo sapiens
  source 1..23: mol_type = genomic DNA
ctctggcatggagttcaaatagg

SEQ ID NO: 3466 - DNA, 23 bp, Homo sapiens
  source 1..23: mol_type = genomic DNA
agaaaaggagattcaagatatgg

SEQ ID NO: 3467 - DNA, 23 bp, Homo sapiens
  source 1..23: mol_type = genomic DNA
gtatctgctaagacaaaatcagg

SEQ ID NO: 3468 - DNA, 23 bp, Homo sapiens
  source 1..23: mol_type = genomic DNA
gatttcaaggggaaaaattaggg

SEQ ID NO: 3469 - DNA, 23 bp, Homo sapiens
  source 1..23: mol_type = genomic DNA
tcaaggcagttggttcgtattgg

SEQ ID NO: 3470 - DNA, 23 bp, Homo sapiens
  source 1..23: mol_type = genomic DNA
ataaggaaagaggaaatataagg

SEQ ID NO: 3471 - DNA, 23 bp, Homo sapiens
  source 1..23: mol_type = genomic DNA
tcactccatttttctccaatggg

SEQ ID NO: 3472 - DNA, 23 bp, Homo sapiens
  source 1..23: mol_type = genomic DNA
caaagaggctagagattgattgg

SEQ ID NO: 3473 - DNA, 23 bp, Homo sapiens
  source 1..23: mol_type = genomic DNA
tatgttcccattttaaaagtagg

SEQ ID NO: 3474 - DNA, 23 bp, Homo sapiens
  source 1..23: mol_type = genomic DNA
atatatcagtaactttaaatggg

SEQ ID NO: 3475 - DNA, 23 bp, Homo sapiens
  source 1..23: mol_type = genomic DNA
atttggctccagcgttttaaggg

SEQ ID NO: 3476 - DNA, 23 bp, Homo sapiens
  source 1..23: mol_type = genomic DNA
aagcagatagaatcgtgaaatgg

SEQ ID NO: 3477 - DNA, 23 bp, Homo sapiens
  source 1..23: mol_type = genomic DNA
agtttgctcagaactatataagg

SEQ ID NO: 3478 - DNA, 23 bp, Homo sapiens
  source 1..23: mol_type = genomic DNA
tcacaaagctatgcattagaagg

SEQ ID NO: 3479 - DNA, 23 bp, Homo sapiens
  source 1..23: mol_type = genomic DNA
acatttatttagaaatgtaatgg

SEQ ID NO: 3480 - DNA, 23 bp, Homo sapiens
  source 1..23: mol_type = genomic DNA
catattatcgtgatgtagatagg

SEQ ID NO: 3481 - DNA, 23 bp, Homo sapiens
  source 1..23: mol_type = genomic DNA
cattggtctctgtatttacaagg

SEQ ID NO: 3482 - DNA, 23 bp, Homo sapiens
  source 1..23: mol_type = genomic DNA
tacttcctcattttagaaaaggg

SEQ ID NO: 3483 - DNA, 23 bp, Homo sapiens
  source 1..23: mol_type = genomic DNA
ctattactgtattgattaagtgg

SEQ ID NO: 3484 - DNA, 23 bp, Homo sapiens
  source 1..23: mol_type = genomic DNA
acctcactattcacggcaaccgg

SEQ ID NO: 3485 - DNA, 23 bp, Homo sapiens
  source 1..23: mol_type = genomic DNA
gaaaaaatctatggtataagagg

SEQ ID NO: 3486 - DNA, 23 bp, Homo sapiens
  source 1..23: mol_type = genomic DNA
ataattttgtaaaatcgaattgg

SEQ ID NO: 3487 - DNA, 23 bp, Homo sapiens
  source 1..23: mol_type = genomic DNA
gtaagtttgtctgcagggcttgg

SEQ ID NO: 3488 - DNA, 23 bp, Homo sapiens
  source 1..23: mol_type = genomic DNA
agagtattctttattttagcagg

SEQ ID NO: 3489 - DNA, 23 bp, Homo sapiens
  source 1..23: mol_type = genomic DNA
acttacactatcttaccaatagg

SEQ ID NO: 3490 - DNA, 23 bp, Homo sapiens
  source 1..23: mol_type = genomic DNA
atcctcttagaaatgacaattgg

SEQ ID NO: 3491 - DNA, 23 bp, Homo sapiens
  source 1..23: mol_type = genomic DNA
ttttcatgacttttcccattggg

SEQ ID NO: 3492 - DNA, 23 bp, Homo sapiens
  source 1..23: mol_type = genomic DNA
ctagcatgctatacatcatatgg

SEQ ID NO: 3493 - DNA, 23 bp, Homo sapiens
  source 1..23: mol_type = genomic DNA
gcctgttccatgtttggtgtggg

SEQ ID NO: 3494 - DNA, 23 bp, Homo sapiens
  source 1..23: mol_type = genomic DNA
gtatatttatctatttttatggg

SEQ ID NO: 3495 - DNA, 23 bp, Homo sapiens
  source 1..23: mol_type = genomic DNA
ggaagggaaattggaacaacagg

SEQ ID NO: 3496 - DNA, 23 bp, Homo sapiens
  source 1..23: mol_type = genomic DNA
tctcgtcttcctgttgtcttcgg

SEQ ID NO: 3497 - DNA, 23 bp, Homo sapiens
  source 1..23: mol_type = genomic DNA
gttttatcattgcttttttgtgg

SEQ ID NO: 3498 - DNA, 23 bp, Homo sapiens
  source 1..23: mol_type = genomic DNA
ataaatgagctggcctgtatagg

SEQ ID NO: 3499 - DNA, 23 bp, Homo sapiens
  source 1..23: mol_type = genomic DNA
ttggtcctcttggatgtaaaagg

SEQ ID NO: 3500 - DNA, 23 bp, Homo sapiens
  source 1..23: mol_type = genomic DNA
gttaagtgaacgcttttcattgg

SEQ ID NO: 3501 - DNA, 23 bp, Homo sapiens
  source 1..23: mol_type = genomic DNA
tctcaacagcctaggatgattgg

SEQ ID NO: 3502 - DNA, 23 bp, Homo sapiens
  source 1..23: mol_type = genomic DNA
tgagcagttaaatatttaaaggg

SEQ ID NO: 3503 - DNA, 23 bp, Homo sapiens
  source 1..23: mol_type = genomic DNA
tctctcttgtgatgtgataaggg

SEQ ID NO: 3504 - DNA, 23 bp, Homo sapiens
  source 1..23: mol_type = genomic DNA
ctataaatatagagtagaaatgg

SEQ ID NO: 3505 - DNA, 23 bp, Homo sapiens
  source 1..23: mol_type = genomic DNA
ttacaaagctgagatatcttagg

SEQ ID NO: 3506 - DNA, 23 bp, Homo sapiens
  source 1..23: mol_type = genomic DNA
atcctgtctggatgacctaatgg

SEQ ID NO: 3507 - DNA, 23 bp, Homo sapiens
  source 1..23: mol_type = genomic DNA
tccacttcatactttcagttagg

SEQ ID NO: 3508 - DNA, 23 bp, Homo sapiens
  source 1..23: mol_type = genomic DNA
gcacatacggcatcaaataatgg

SEQ ID NO: 3509 - DNA, 23 bp, Homo sapiens
  source 1..23: mol_type = genomic DNA
cctgttgcataaaagtaataagg

SEQ ID NO: 3510 - DNA, 23 bp, Homo sapiens
  source 1..23: mol_type = genomic DNA
taaaccagaatttaaattgaggg

SEQ ID NO: 3511 - DNA, 23 bp, Homo sapiens
  source 1..23: mol_type = genomic DNA
acacttgtaatccatccttaagg

SEQ ID NO: 3512 - DNA, 23 bp, Homo sapiens
  source 1..23: mol_type = genomic DNA
cttggaactatatttagtatagg

SEQ ID NO: 3513 - DNA, 23 bp, Homo sapiens
  source 1..23: mol_type = genomic DNA
tcctaagtcagaagtctattggg

SEQ ID NO: 3514 - DNA, 23 bp, Homo sapiens
  source 1..23: mol_type = genomic DNA
gcctctcgatattttacaacagg

SEQ ID NO: 3515 - DNA, 23 bp, Homo sapiens
  source 1..23: mol_type = genomic DNA
tcaattgcttttttattgtaggg

SEQ ID NO: 3516 - DNA, 23 bp, Homo sapiens
  source 1..23: mol_type = genomic DNA
ttttgccctctggtactttgtgg

SEQ ID NO: 3517 - DNA, 23 bp, Homo sapiens
  source 1..23: mol_type = genomic DNA
aatgatatggtcttaatagaagg

SEQ ID NO: 3518 - DNA, 23 bp, Homo sapiens
  source 1..23: mol_type = genomic DNA
tcttaaccatcacatgcctttgg

SEQ ID NO: 3519 - DNA, 23 bp, Homo sapiens
  source 1..23: mol_type = genomic DNA
tcttttgtctgttatttccctgg

SEQ ID NO: 3520 - DNA, 23 bp, Homo sapiens
  source 1..23: mol_type = genomic DNA
gcctaaagcactgagaattaggg

SEQ ID NO: 3521 - DNA, 23 bp, Homo sapiens
  source 1..23: mol_type = genomic DNA
tcttgtttcataagaaaaacagg

SEQ ID NO: 3522 - DNA, 23 bp, Homo sapiens
  source 1..23: mol_type = genomic DNA
atacgttatttagctcccttagg

SEQ ID NO: 3523 - DNA, 23 bp, Homo sapiens
  source 1..23: mol_type = genomic DNA
ctttttaactaacagactaatgg

SEQ ID NO: 3524 - DNA, 23 bp, Homo sapiens
  source 1..23: mol_type = genomic DNA
aaagttctcttttttttccatgg

SEQ ID NO: 3525 - DNA, 23 bp, Homo sapiens
  source 1..23: mol_type = genomic DNA
ataatatgctgtaatatatgagg

SEQ ID NO: 3526 - DNA, 23 bp, Homo sapiens
  source 1..23: mol_type = genomic DNA
gctatcctgcagatgctaatggg

SEQ ID NO: 3527 - DNA, 23 bp, Homo sapiens
  source 1..23: mol_type = genomic DNA
attttaggttgtttttataaggg

SEQ ID NO: 3528 - DNA, 23 bp, Homo sapiens
  source 1..23: mol_type = genomic DNA
ctacaaactatttatttgcttgg

SEQ ID NO: 3529 - DNA, 23 bp, Homo sapiens
  source 1..23: mol_type = genomic DNA
aatagattccaagtatgtattgg

SEQ ID NO: 3530 - DNA, 23 bp, Homo sapiens
  source 1..23: mol_type = genomic DNA
atatctcagaatgattttagagg

SEQ ID NO: 3531 - DNA, 23 bp, Homo sapiens
  source 1..23: mol_type = genomic DNA
agcttagcgaacagtggcctggg

SEQ ID NO: 3532 - DNA, 23 bp, Homo sapiens
  source 1..23: mol_type = genomic DNA
ttaagggtcaacgaaatctaagg

SEQ ID NO: 3533 - DNA, 23 bp, Homo sapiens
  source 1..23: mol_type = genomic DNA
gtttgatttagcactcttaaggg

SEQ ID NO: 3534 - DNA, 23 bp, Homo sapiens
  source 1..23: mol_type = genomic DNA
tcattacagcagctacaaaaagg

SEQ ID NO: 3535 - DNA, 23 bp, Homo sapiens
  source 1..23: mol_type = genomic DNA
aatatactgacagtatatattgg

SEQ ID NO: 3536 - DNA, 23 bp, Homo sapiens
  source 1..23: mol_type = genomic DNA
gctgtctaaatgcctcaaaatgg

SEQ ID NO: 3537 - DNA, 23 bp, Homo sapiens
  source 1..23: mol_type = genomic DNA
caatacctacataaaaataaggg

SEQ ID NO: 3538 - DNA, 23 bp, Homo sapiens
  source 1..23: mol_type = genomic DNA
gtgtaattgctaaatattgtagg

SEQ ID NO: 3539 - DNA, 23 bp, Homo sapiens
  source 1..23: mol_type = genomic DNA
gtagggattagttttaaataggg

SEQ ID NO: 3540 - DNA, 23 bp, Homo sapiens
  source 1..23: mol_type = genomic DNA
tatttttaagtattattagtagg

SEQ ID NO: 3541 - DNA, 23 bp, Homo sapiens
  source 1..23: mol_type = genomic DNA
attgaaatcctaggaaactttgg

SEQ ID NO: 3542 - DNA, 23 bp, Homo sapiens
  source 1..23: mol_type = genomic DNA
ttttccacagtgatccatattgg

SEQ ID NO: 3543 - DNA, 23 bp, Homo sapiens
  source 1..23: mol_type = genomic DNA
tcaaacgtgcaaaatatgtttgg

SEQ ID NO: 3544 - DNA, 23 bp, Homo sapiens
  source 1..23: mol_type = genomic DNA
gtgtgtgtacattcacaatttgg

SEQ ID NO: 3545 - DNA, 23 bp, Homo sapiens
  source 1..23: mol_type = genomic DNA
actatatatcccattttaagagg

SEQ ID NO: 3546 - DNA, 23 bp, Homo sapiens
  source 1..23: mol_type = genomic DNA
aattccagttttatcatgatagg

SEQ ID NO: 3547 - DNA, 23 bp, Homo sapiens
  source 1..23: mol_type = genomic DNA
tttctcttcttaaaagctaaagg

SEQ ID NO: 3548 - DNA, 23 bp, Homo sapiens
  source 1..23: mol_type = genomic DNA
aattaagtgtcatcatctaatgg

SEQ ID NO: 3549 - DNA, 23 bp, Homo sapiens
  source 1..23: mol_type = genomic DNA
gattttcctttcatggactaagg

SEQ ID NO: 3550 - DNA, 23 bp, Homo sapiens
  source 1..23: mol_type = genomic DNA
gattagaagggaacgtaatcagg

SEQ ID NO: 3551 - DNA, 23 bp, Homo sapiens
  source 1..23: mol_type = genomic DNA
gcttggtctgattgatttgaagg

SEQ ID NO: 3552 - DNA, 23 bp, Homo sapiens
  source 1..23: mol_type = genomic DNA
gacccacaattcaaacgtttggg

SEQ ID NO: 3553 - DNA, 23 bp, Homo sapiens
  source 1..23: mol_type = genomic DNA
ttaacagtattaagatcataagg

SEQ ID NO: 3554 - DNA, 23 bp, Homo sapiens
  source 1..23: mol_type = genomic DNA
tgttgcctgtagtaacaaatagg

SEQ ID NO: 3555 - DNA, 23 bp, Homo sapiens
  source 1..23: mol_type = genomic DNA
attctaggtatgttccaaaaagg

SEQ ID NO: 3556 - DNA, 23 bp, Homo sapiens
  source 1..23: mol_type = genomic DNA
aggaattcacaaacacagatagg

SEQ ID NO: 3557 - DNA, 23 bp, Homo sapiens
  source 1..23: mol_type = genomic DNA
cttagaataaacgtatcctttgg

SEQ ID NO: 3558 - DNA, 23 bp, Homo sapiens
  source 1..23: mol_type = genomic DNA
aaagtccccctaagttttagagg

SEQ ID NO: 3559 - DNA, 23 bp, Homo sapiens
  source 1..23: mol_type = genomic DNA
gggcagctttctgaactgattgg

SEQ ID NO: 3560 - DNA, 23 bp, Homo sapiens
  source 1..23: mol_type = genomic DNA
agaaatctgtgaataaataaagg

SEQ ID NO: 3561 - DNA, 23 bp, Homo sapiens
  source 1..23: mol_type = genomic DNA
atctcaggttcctctccctttgg

SEQ ID NO: 3562 - DNA, 23 bp, Homo sapiens
  source 1..23: mol_type = genomic DNA
gttcactgagcataatgtattgg

SEQ ID NO: 3563 - DNA, 23 bp, Homo sapiens
  source 1..23: mol_type = genomic DNA
cagaatgccttaaaaagaaatgg

SEQ ID NO: 3564 - DNA, 23 bp, Homo sapiens
  source 1..23: mol_type = genomic DNA
ggaaattaggggtaaatagatgg

SEQ ID NO: 3565 - DNA, 23 bp, Homo sapiens
  source 1..23: mol_type = genomic DNA
gtgccattaatattacaaaatgg

SEQ ID NO: 3566 - DNA, 23 bp, Homo sapiens
  source 1..23: mol_type = genomic DNA
ttaatttcctaggaggagttggg

SEQ ID NO: 3567 - DNA, 23 bp, Homo sapiens
  source 1..23: mol_type = genomic DNA
tcagatgcggaaatttcatttgg

SEQ ID NO: 3568 - DNA, 23 bp, Homo sapiens
  source 1..23: mol_type = genomic DNA
gtgctccaaaaatttttagtagg

SEQ ID NO: 3569 - DNA, 23 bp, Homo sapiens
  source 1..23: mol_type = genomic DNA
ttctcattaacaaatgtagatgg

SEQ ID NO: 3570 - DNA, 23 bp, Homo sapiens
  source 1..23: mol_type = genomic DNA
ggggaggtgaaaaagatttacgg

SEQ ID NO: 3571 - DNA, 23 bp, Homo sapiens
  source 1..23: mol_type = genomic DNA
tcataagccccaaattttgatgg

SEQ ID NO: 3572 - DNA, 23 bp, Homo sapiens
  source 1..23: mol_type = genomic DNA
gctgaaagccttggaactttcgg

SEQ ID NO: 3573 - DNA, 23 bp, Homo sapiens
  source 1..23: mol_type = genomic DNA
tgctcttttggtgtgatcaaggg

SEQ ID NO: 3574 - DNA, 23 bp, Homo sapiens
  source 1..23: mol_type = genomic DNA
gagagaatctgtttacatattgg

SEQ ID NO: 3575 - DNA, 23 bp, Homo sapiens
  source 1..23: mol_type = genomic DNA
acatccatcaaaaaactctttgg

SEQ ID NO: 3576 - DNA, 23 bp, Homo sapiens
  source 1..23: mol_type = genomic DNA
ttactgacctctaaaacttaggg

SEQ ID NO: 3577 - DNA, 23 bp, Homo sapiens
  source 1..23: mol_type = genomic DNA
tcaaagaaggaagagttcattgg

SEQ ID NO: 3578 - DNA, 23 bp, Homo sapiens
  source 1..23: mol_type = genomic DNA
tttttcccattattgctagaagg

SEQ ID NO: 3579 - DNA, 23 bp, Homo sapiens
  source 1..23: mol_type = genomic DNA
gtatagttctatgtgctataagg

SEQ ID NO: 3580 - DNA, 23 bp, Homo sapiens
  source 1..23: mol_type = genomic DNA
ttgactcccagctcaactttggg

SEQ ID NO: 3581 - DNA, 23 bp, Homo sapiens
  source 1..23: mol_type = genomic DNA
ttaaaagtcaattttgaatccgg

SEQ ID NO: 3582 - DNA, 23 bp, Homo sapiens
  source 1..23: mol_type = genomic DNA
aacttcatcctaaggtcaatagg

SEQ ID NO: 3583 - DNA, 23 bp, Homo sapiens
  source 1..23: mol_type = genomic DNA
ctattttgaagcaaaggtttagg

SEQ ID NO: 3584 - DNA, 23 bp, Homo sapiens
  source 1..23: mol_type = genomic DNA
ttatgcgtagggttctgtttagg

SEQ ID NO: 3585 - DNA, 23 bp, Homo sapiens
  source 1..23: mol_type = genomic DNA
gtacgtatttaaaaacgattagg

SEQ ID NO: 3586 - DNA, 23 bp, Homo sapiens
  source 1..23: mol_type = genomic DNA
tatggtaaaataaagtataaggg

SEQ ID NO: 3587 - DNA, 23 bp, Homo sapiens
  source 1..23: mol_type = genomic DNA
tcattttattcccttatttaggg

SEQ ID NO: 3588 - DNA, 23 bp, Homo sapiens
  source 1..23: mol_type = genomic DNA
tgaattgaatttttgaagatggg

SEQ ID NO: 3589 - DNA, 23 bp, Homo sapiens
  source 1..23: mol_type = genomic DNA
gctagtttatgtgctatgttagg

SEQ ID NO: 3590 - DNA, 23 bp, Homo sapiens
  source 1..23: mol_type = genomic DNA
tgctctgtgaagaaagaaattgg

SEQ ID NO: 3591 - DNA, 23 bp, Homo sapiens
  source 1..23: mol_type = genomic DNA
attgactatgaatttatagatgg

SEQ ID NO: 3592 - DNA, 23 bp, Homo sapiens
  source 1..23: mol_type = genomic DNA
tatttactcaacttacactatgg

SEQ ID NO: 3593 - DNA, 23 bp, Homo sapiens
  source 1..23: mol_type = genomic DNA
ctgtcaactctctagaagatagg

SEQ ID NO: 3594 - DNA, 23 bp, Homo sapiens
  source 1..23: mol_type = genomic DNA
tttttacaggaaaatacattagg

SEQ ID NO: 3595 - DNA, 23 bp, Homo sapiens
  source 1..23: mol_type = genomic DNA
ctgtcaacagataatttagaagg

SEQ ID NO: 3596 - DNA, 23 bp, Homo sapiens
  source 1..23: mol_type = genomic DNA
gctatggcaccttcagtgatagg

SEQ ID NO: 3597 - DNA, 23 bp, Homo sapiens
  source 1..23: mol_type = genomic DNA
gcaatccatttctattatatggg

SEQ ID NO: 3598 - DNA, 23 bp, Homo sapiens
  source 1..23: mol_type = genomic DNA
aaccagccccagaagtaaactgg

SEQ ID NO: 3599 - DNA, 23 bp, Homo sapiens
  source 1..23: mol_type = genomic DNA
agctagtcttaaaatcaaaaagg

SEQ ID NO: 3600 - DNA, 23 bp, Homo sapiens
  source 1..23: mol_type = genomic DNA
tgctggctatacacttttaaggg

SEQ ID NO: 3601 - DNA, 23 bp, Homo sapiens
  source 1..23: mol_type = genomic DNA
tcatggttgcctattgacttagg

SEQ ID NO: 3602 - DNA, 23 bp, Homo sapiens
  source 1..23: mol_type = genomic DNA
tcaaatagataccttttaaaggg

SEQ ID NO: 3603 - DNA, 23 bp, Homo sapiens
  source 1..23: mol_type = genomic DNA
ttaatatcattgtatgcaactgg

SEQ ID NO: 3604 - DNA, 23 bp, Homo sapiens
  source 1..23: mol_type = genomic DNA
gctcctgcttgagctattgttgg

SEQ ID NO: 3605 - DNA, 23 bp, Homo sapiens
  source 1..23: mol_type = genomic DNA
ggaagtcaatttaaaataagagg

SEQ ID NO: 3606 - DNA, 23 bp, Homo sapiens
  source 1..23: mol_type = genomic DNA
tactttccttaatctataaaggg

SEQ ID NO: 3607 - DNA, 23 bp, Homo sapiens
  source 1..23: mol_type = genomic DNA
agtagtcattctaaaaagattgg

SEQ ID NO: 3608 - DNA, 23 bp, Homo sapiens
  source 1..23: mol_type = genomic DNA
tggctgttaatatctcaaaaagg

SEQ ID NO: 3609 - DNA, 23 bp, Homo sapiens
  source 1..23: mol_type = genomic DNA
actacggcaaatttacaaactgg

SEQ ID NO: 3610 - DNA, 23 bp, Homo sapiens
  source 1..23: mol_type = genomic DNA
ttataaactggcaagaatatcgg

SEQ ID NO: 3611 - DNA, 23 bp, Homo sapiens
  source 1..23: mol_type = genomic DNA
tgttggtccttcataatacttgg

SEQ ID NO: 3612 - DNA, 23 bp, Homo sapiens
  source 1..23: mol_type = genomic DNA
gatattttggagcattataaagg

SEQ ID NO: 3613 - DNA, 23 bp, Homo sapiens
  source 1..23: mol_type = genomic DNA
acattcaaagtgatgagctttgg

SEQ ID NO: 3614 - DNA, 23 bp, Homo sapiens
  source 1..23: mol_type = genomic DNA
atttgccagcattaataataggg

SEQ ID NO: 3615 - DNA, 23 bp, Homo sapiens
  source 1..23: mol_type = genomic DNA
agggtagctgtataattaaaagg

SEQ ID NO: 3616 - DNA, 23 bp, Homo sapiens
  source 1..23: mol_type = genomic DNA
atagagaattattatatcattgg

SEQ ID NO: 3617 - DNA, 23 bp, Homo sapiens
  source 1..23: mol_type = genomic DNA
gttcagaaccacgcacttgtagg

SEQ ID NO: 3618 - DNA, 23 bp, Homo sapiens
  source 1..23: mol_type = genomic DNA
agagttaaaagaatttataatgg

SEQ ID NO: 3619 - DNA, 23 bp, Homo sapiens
  source 1..23: mol_type = genomic DNA
tgatttctaccacagccttttgg

SEQ ID NO: 3620 - DNA, 23 bp, Homo sapiens
  source 1..23: mol_type = genomic DNA
gctgtaatgttgacaatatctgg

SEQ ID NO: 3621 - DNA, 23 bp, Homo sapiens
  source 1..23: mol_type = genomic DNA
ctttaaggaaagtttttaaaggg

SEQ ID NO: 3622 - DNA, 23 bp, Homo sapiens
  source 1..23: mol_type = genomic DNA
tatcttgctttgctataaacagg

SEQ ID NO: 3623 - DNA, 23 bp, Homo sapiens
  source 1..23: mol_type = genomic DNA
gtaggtttagaaaaaatctatgg

SEQ ID NO: 3624 - DNA, 23 bp, Homo sapiens
  source 1..23: mol_type = genomic DNA
ttcactgtatgtgaacaaatagg

SEQ ID NO: 3625 - DNA, 23 bp, Homo sapiens
  source 1..23: mol_type = genomic DNA
ttaatttatgagcctttgtctgg

SEQ ID NO: 3626 - DNA, 23 bp, Homo sapiens
  source 1..23: mol_type = genomic DNA
tataatatgccaatgtctatagg

SEQ ID NO: 3627 - DNA, 23 bp, Homo sapiens
  source 1..23: mol_type = genomic DNA
aagtctgatgatttgcttaaggg

SEQ ID NO: 3628 - DNA, 23 bp, Homo sapiens
  source 1..23: mol_type = genomic DNA
cggctgttattcagttataatgg

SEQ ID NO: 3629 - DNA, 23 bp, Homo sapiens
  source 1..23: mol_type = genomic DNA
taccatacgctaatcaactatgg

SEQ ID NO: 3630 - DNA, 23 bp, Homo sapiens
  source 1..23: mol_type = genomic DNA
ttaaagctgctgaagtttgttgg

SEQ ID NO: 3631 - DNA, 23 bp, Homo sapiens
  source 1..23: mol_type = genomic DNA
tgtttaggctgccattttaaggg

SEQ ID NO: 3632 - DNA, 23 bp, Homo sapiens
  source 1..23: mol_type = genomic DNA
ttttccctcccaaatcataaagg

SEQ ID NO: 3633 - DNA, 23 bp, Homo sapiens
  source 1..23: mol_type = genomic DNA
aggtttcactgaaccattagagg

SEQ ID NO: 3634 - DNA, 23 bp, Homo sapiens
  source 1..23: mol_type = genomic DNA
atattcttacccttggaatcagg

SEQ ID NO: 3635 - DNA, 23 bp, Homo sapiens
  source 1..23: mol_type = genomic DNA
tgcttcacttactccttaagagg

SEQ ID NO: 3636 - DNA, 23 bp, Homo sapiens
  source 1..23: mol_type = genomic DNA
gtatatatacgtggcttatgagg

SEQ ID NO: 3637 - DNA, 23 bp, Homo sapiens
  source 1..23: mol_type = genomic DNA
ggtaactgaggtgttcaatatgg

SEQ ID NO: 3638 - DNA, 23 bp, Homo sapiens
  source 1..23: mol_type = genomic DNA
ttttcctgaccagaaataacagg

SEQ ID NO: 3639 - DNA, 23 bp, Homo sapiens
  source 1..23: mol_type = genomic DNA
atggctagtttctcattaaaggg

SEQ ID NO: 3640 - DNA, 23 bp, Homo sapiens
  source 1..23: mol_type = genomic DNA
aagcaaattttagaaataagagg

SEQ ID NO: 3641 - DNA, 23 bp, Homo sapiens
  source 1..23: mol_type = genomic DNA
tatgtaactgttactaaatacgg

SEQ ID NO: 3642 - DNA, 23 bp, Homo sapiens
  source 1..23: mol_type = genomic DNA
gattttcagcacctgctattggg

SEQ ID NO: 3643 - DNA, 23 bp, Homo sapiens
  source 1..23: mol_type = genomic DNA
ccataactccaatttgctaatgg

SEQ ID NO: 3644 - DNA, 23 bp, Homo sapiens
  source 1..23: mol_type = genomic DNA
agaaccgtgcccaatacttatgg

SEQ ID NO: 3645 - DNA, 23 bp, Homo sapiens
  source 1..23: mol_type = genomic DNA
gtagctataagtgatttaacagg

SEQ ID NO: 3646 - DNA, 23 bp, Homo sapiens
  source 1..23: mol_type = genomic DNA
atatggatcactgtggaaaaagg

SEQ ID NO: 3647 - DNA, 23 bp, Homo sapiens
  source 1..23: mol_type = genomic DNA
ctttatcgtttagttattaaggg

SEQ ID NO: 3648 - DNA, 23 bp, Homo sapiens
  source 1..23: mol_type = genomic DNA
ggagcatagctattcctaaatgg

SEQ ID NO: 3649 - DNA, 23 bp, Homo sapiens
  source 1..23: mol_type = genomic DNA
gatttggggttgaatgggggggg

SEQ ID NO: 3650 - DNA, 23 bp, Homo sapiens
  source 1..23: mol_type = genomic DNA
ccaggattacttgcctttgtagg

SEQ ID NO: 3651 - DNA, 23 bp, Homo sapiens
  source 1..23: mol_type = genomic DNA
acagttcccaaggatttgtttgg

SEQ ID NO: 3652 - DNA, 23 bp, Homo sapiens
  source 1..23: mol_type = genomic DNA
attccagaacaaattcaatatgg

SEQ ID NO: 3653 - DNA, 23 bp, Homo sapiens
  source 1..23: mol_type = genomic DNA
tttctgttccttcccacaatagg

SEQ ID NO: 3654 - DNA, 23 bp, Homo sapiens
  source 1..23: mol_type = genomic DNA
gacatgggcaacaaattagatgg

SEQ ID NO: 3655 - DNA, 23 bp, Homo sapiens
  source 1..23: mol_type = genomic DNA
tgtgccttatatttcaaaatcgg

SEQ ID NO: 3656 - DNA, 23 bp, Homo sapiens
  source 1..23: mol_type = genomic DNA
cacaatgcagaaatcattatagg

SEQ ID NO: 3657 - DNA, 23 bp, Homo sapiens
  source 1..23: mol_type = genomic DNA
ccatcactttcacaaaactatgg

SEQ ID NO: 3658 - DNA, 23 bp, Homo sapiens
  source 1..23: mol_type = genomic DNA
tatatgggaaaggttacattagg

SEQ ID NO: 3659 - DNA, 23 bp, Homo sapiens
  source 1..23: mol_type = genomic DNA
cctgcaattggaaagatacttgg

SEQ ID NO: 3660 - DNA, 23 bp, Homo sapiens
  source 1..23: mol_type = genomic DNA
gagtaattaaaagtgctttaggg

SEQ ID NO: 3661 - DNA, 23 bp, Homo sapiens
  source 1..23: mol_type = genomic DNA
gacacagtctgaatagtaattgg

SEQ ID NO: 3662 - DNA, 23 bp, Homo sapiens
  source 1..23: mol_type = genomic DNA
tttatatccactattgtgattgg

SEQ ID NO: 3663 - DNA, 23 bp, Homo sapiens
  source 1..23: mol_type = genomic DNA
gcctttggagaggatgcattcgg

SEQ ID NO: 3664 - DNA, 23 bp, Homo sapiens
  source 1..23: mol_type = genomic DNA
cacagtttactttatgcaaatgg

SEQ ID NO: 3665 - DNA, 23 bp, Homo sapiens
  source 1..23: mol_type = genomic DNA
ctatgttactgaaaagtaactgg

SEQ ID NO: 3666 - DNA, 23 bp, Homo sapiens
  source 1..23: mol_type = genomic DNA
ttagctcttccaacaataacagg

SEQ ID NO: 3667 - DNA, 23 bp, Homo sapiens
  source 1..23: mol_type = genomic DNA
ccaaagttattttttccccttgg

SEQ ID NO: 3668 - DNA, 23 bp, Homo sapiens
  source 1..23: mol_type = genomic DNA
gcaatagtccgtaaacttccggg

SEQ ID NO: 3669 - DNA, 23 bp, Homo sapiens
  source 1..23: mol_type = genomic DNA
atatgctccctcattcttctggg

SEQ ID NO: 3670 - DNA, 23 bp, Homo sapiens
  source 1..23: mol_type = genomic DNA
ttcttctcactgaatattaaggg

SEQ ID NO: 3671 - DNA, 23 bp, Homo sapiens
  source 1..23: mol_type = genomic DNA
agtatttagagcaaaaaaaaagg

SEQ ID NO: 3672 - DNA, 23 bp, Homo sapiens
  source 1..23: mol_type = genomic DNA
tccttgtgttattaaatagatgg

SEQ ID NO: 3673 - DNA, 23 bp, Homo sapiens
  source 1..23: mol_type = genomic DNA
attactttcattaaaagaatagg

SEQ ID NO: 3674 - DNA, 23 bp, Homo sapiens
  source 1..23: mol_type = genomic DNA
atggcactattgcctcaaaatgg

SEQ ID NO: 3675 - DNA, 23 bp, Homo sapiens
  source 1..23: mol_type = genomic DNA
tatgctttgttttttctcaatgg

SEQ ID NO: 3676 - DNA, 23 bp, Homo sapiens
  source 1..23: mol_type = genomic DNA
gcagtagctcagaatgagatagg

SEQ ID NO: 3677 - DNA, 23 bp, Homo sapiens
  source 1..23: mol_type = genomic DNA
gcacagtaattattcattatggg

SEQ ID NO: 3678 - DNA, 23 bp, Homo sapiens
  source 1..23: mol_type = genomic DNA
tctgagtctgaagcagaaactgg

SEQ ID NO: 3679 - DNA, 23 bp, Homo sapiens
  source 1..23: mol_type = genomic DNA
ggcttatgatgttaatttagtgg

SEQ ID NO: 3680 - DNA, 23 bp, Homo sapiens
  source 1..23: mol_type = genomic DNA
gttctttcagaacataataatgg

SEQ ID NO: 3681 - DNA, 23 bp, Homo sapiens
  source 1..23: mol_type = genomic DNA
gagaagctaaagagtaaatcagg

SEQ ID NO: 3682 - DNA, 23 bp, Homo sapiens
  source 1..23: mol_type = genomic DNA
gataaatcttagctacaatatgg

SEQ ID NO: 3683 - DNA, 23 bp, Homo sapiens
  source 1..23: mol_type = genomic DNA
ttagcacctatgtcagtaattgg

SEQ ID NO: 3684 - DNA, 23 bp, Homo sapiens
  source 1..23: mol_type = genomic DNA
agtattctcagagatgaaaaagg

SEQ ID NO: 3685 - DNA, 23 bp, Homo sapiens
  source 1..23: mol_type = genomic DNA
cctcttttcagttcaaagaatgg

SEQ ID NO: 3686 - DNA, 23 bp, Homo sapiens
  source 1..23: mol_type = genomic DNA
acagagtctatttctccattagg

SEQ ID NO: 3687 - DNA, 23 bp, Homo sapiens
  source 1..23: mol_type = genomic DNA
ttagagtcagtgagtttattagg

SEQ ID NO: 3688 - DNA, 23 bp, Homo sapiens
  source 1..23: mol_type = genomic DNA
atatggattgtctaagtcattgg

SEQ ID NO: 3689 - DNA, 23 bp, Homo sapiens
  source 1..23: mol_type = genomic DNA
aaacaacccaaaattttaatggg

SEQ ID NO: 3690 - DNA, 23 bp, Homo sapiens
  source 1..23: mol_type = genomic DNA
tttctaatagaagtataaaaagg

SEQ ID NO: 3691 - DNA, 23 bp, Homo sapiens
  source 1..23: mol_type = genomic DNA
gagaatgtagatggcttaatggg

SEQ ID NO: 3692 - DNA, 23 bp, Homo sapiens
  source 1..23: mol_type = genomic DNA
ataccacgctttgaaaatactgg

SEQ ID NO: 3693 - DNA, 23 bp, Homo sapiens
  source 1..23: mol_type = genomic DNA
ataaaaggaaactttttagatgg

SEQ ID NO: 3694 - DNA, 23 bp, Homo sapiens
  source 1..23: mol_type = genomic DNA
tagttatgtaaattattttaggg

SEQ ID NO: 3695 - DNA, 23 bp, Homo sapiens
  source 1..23: mol_type = genomic DNA
agccacactgaaagaatatatgg

SEQ ID NO: 3696 - DNA, 23 bp, Homo sapiens
  source 1..23: mol_type = genomic DNA
atatttagctatagtcgtttagg

SEQ ID NO: 3697 - DNA, 23 bp, Homo sapiens
  source 1..23: mol_type = genomic DNA
gcatttaccatgcaagaaaaagg

SEQ ID NO: 3698 - DNA, 23 bp, Homo sapiens
  source 1..23: mol_type = genomic DNA
cctttgccgatcagctttaaggg

SEQ ID NO: 3699 - DNA, 23 bp, Homo sapiens
  source 1..23: mol_type = genomic DNA
tccacaactactaaaaaaaaagg

SEQ ID NO: 3700 - DNA, 23 bp, Homo sapiens
  source 1..23: mol_type = genomic DNA
ggatccttgttataaacgtttgg

SEQ ID NO: 3701 - DNA, 23 bp, Homo sapiens
  source 1..23: mol_type = genomic DNA
ttgtttttagaattattatctgg

SEQ ID NO: 3702 - DNA, 23 bp, Homo sapiens
  source 1..23: mol_type = genomic DNA
atagaagctgaactctaaactgg

SEQ ID NO: 3703 - DNA, 23 bp, Homo sapiens
  source 1..23: mol_type = genomic DNA
ggatgaacttcattataatctgg

SEQ ID NO: 3704 - DNA, 23 bp, Homo sapiens
  source 1..23: mol_type = genomic DNA
agatgacatgtctaacaaaatgg

SEQ ID NO: 3705 - DNA, 23 bp, Homo sapiens
  source 1..23: mol_type = genomic DNA
atgcagggtggtcaggtaaaagg

SEQ ID NO: 3706 - DNA, 23 bp, Homo sapiens
  source 1..23: mol_type = genomic DNA
cttgtggtgctgctgagatttgg

SEQ ID NO: 3707 - DNA, 23 bp, Homo sapiens
  source 1..23: mol_type = genomic DNA
actttgctgttgtccccatctgg

SEQ ID NO: 3708 - DNA, 23 bp, Homo sapiens
  source 1..23: mol_type = genomic DNA
ttagggatatgattactcttggg

SEQ ID NO: 3709 - DNA, 23 bp, Homo sapiens
  source 1..23: mol_type = genomic DNA
gctcccaagctacctttaactgg

SEQ ID NO: 3710 - DNA, 23 bp, Homo sapiens
  source 1..23: mol_type = genomic DNA
ttatttgatagactagtaaaagg

SEQ ID NO: 3711 - DNA, 23 bp, Homo sapiens
  source 1..23: mol_type = genomic DNA
tttactccgaaaaactatttcgg

SEQ ID NO: 3712 - DNA, 23 bp, Homo sapiens
  source 1..23: mol_type = genomic DNA
ttaattatcacacactataaagg

SEQ ID NO: 3713 - DNA, 23 bp, Homo sapiens
  source 1..23: mol_type = genomic DNA
tcaggagtctaggtttcttcagg

SEQ ID NO: 3714 - DNA, 23 bp, Homo sapiens
  source 1..23: mol_type = genomic DNA
gccaggcattgtctgatttaggg

SEQ ID NO: 3715 - DNA, 23 bp, Homo sapiens
  source 1..23: mol_type = genomic DNA
atgtatttctttgttaaagatgg

SEQ ID NO: 3716 - DNA, 23 bp, Homo sapiens
  source 1..23: mol_type = genomic DNA
tgatattaacatgaaaaaattgg

SEQ ID NO: 3717 - DNA, 23 bp, Homo sapiens
  source 1..23: mol_type = genomic DNA
cccacattgctggtaccgttggg

SEQ ID NO: 3718 - DNA, 23 bp, Homo sapiens
  source 1..23: mol_type = genomic DNA
ctctaggctaaacatataaaagg

SEQ ID NO: 3719 - DNA, 23 bp, Homo sapiens
  source 1..23: mol_type = genomic DNA
cataggagcctttggctaaaggg

SEQ ID NO: 3720 - DNA, 23 bp, Homo sapiens
  source 1..23: mol_type = genomic DNA
tcaattccttgcatttttgcagg

SEQ ID NO: 3721 - DNA, 23 bp, Homo sapiens
  source 1..23: mol_type = genomic DNA
agtgatttgcattatcctatagg

SEQ ID NO: 3722 - DNA, 23 bp, Homo sapiens
  source 1..23: mol_type = genomic DNA
aagagaagtggaaggtttagagg

SEQ ID NO: 3723 - DNA, 23 bp, Homo sapiens
  source 1..23: mol_type = genomic DNA
gatagattaaggaaagaaaaagg

SEQ ID NO: 3724 - DNA, 23 bp, Homo sapiens
  source 1..23: mol_type = genomic DNA
ctacccgaaatatcattcttagg

SEQ ID NO: 3725 - DNA, 23 bp, Homo sapiens
  source 1..23: mol_type = genomic DNA
aatttattcatgtataaaactgg

SEQ ID NO: 3726 - DNA, 23 bp, Homo sapiens
  source 1..23: mol_type = genomic DNA
cggtgtgaaatagacaaaaatgg

SEQ ID NO: 3727 - DNA, 23 bp, Homo sapiens
  source 1..23: mol_type = genomic DNA
gccatgggcttcattgtctatgg

SEQ ID NO: 3728 - DNA, 23 bp, Homo sapiens
  source 1..23: mol_type = genomic DNA
ttgactgcccaaacctctaatgg

SEQ ID NO: 3729 - DNA, 23 bp, Homo sapiens
  source 1..23: mol_type = genomic DNA
gcacagaatcatttttatatagg

SEQ ID NO: 3730 - DNA, 23 bp, Homo sapiens
  source 1..23: mol_type = genomic DNA
ggtagatgtatttttaagctagg

SEQ ID NO: 3731 - DNA, 23 bp, Homo sapiens
  source 1..23: mol_type = genomic DNA
gccaacatgcaataaaagtttgg

SEQ ID NO: 3732 - DNA, 23 bp, Homo sapiens
  source 1..23: mol_type = genomic DNA
acacaggtgcgcaactttatagg

SEQ ID NO: 3733 - DNA, 23 bp, Homo sapiens
  source 1..23: mol_type = genomic DNA
cttggaatgcaatctttcttggg

SEQ ID NO: 3734 - DNA, 23 bp, Homo sapiens
  source 1..23: mol_type = genomic DNA
tttctactaaggcaacattttgg

SEQ ID NO: 3735 - DNA, 23 bp, Homo sapiens
  source 1..23: mol_type = genomic DNA
agagcgatagagggagataaagg

SEQ ID NO: 3736 - DNA, 23 bp, Homo sapiens
  source 1..23: mol_type = genomic DNA
cctatttctataaactttaaggg

SEQ ID NO: 3737 - DNA, 23 bp, Homo sapiens
  source 1..23: mol_type = genomic DNA
tatgttattgaaatcatttaggg

SEQ ID NO: 3738 - DNA, 23 bp, Homo sapiens
  source 1..23: mol_type = genomic DNA
ttcatcaccgtgattactaatgg

SEQ ID NO: 3739 - DNA, 23 bp, Homo sapiens
  source 1..23: mol_type = genomic DNA
acaatgtagtgaaaataaattgg

SEQ ID NO: 3740 - DNA, 23 bp, Homo sapiens
  source 1..23: mol_type = genomic DNA
cacacaccttttcaaataagagg

SEQ ID NO: 3741 - DNA, 23 bp, Homo sapiens
  source 1..23: mol_type = genomic DNA
tgtccttcagatttagttagtgg

SEQ ID NO: 3742 - DNA, 23 bp, Homo sapiens
  source 1..23: mol_type = genomic DNA
ttctatttagtgccatttagagg

SEQ ID NO: 3743 - DNA, 23 bp, Homo sapiens
  source 1..23: mol_type = genomic DNA
actgtcctcaagaggaaattagg

SEQ ID NO: 3744 - DNA, 23 bp, Homo sapiens
  source 1..23: mol_type = genomic DNA
cattaagctaagcaaataaatgg

SEQ ID NO: 3745 - DNA, 23 bp, Homo sapiens
  source 1..23: mol_type = genomic DNA
tctcttcctttatcagattacgg

SEQ ID NO: 3746 - DNA, 23 bp, Homo sapiens
  source 1..23: mol_type = genomic DNA
catttgtgctgtcaaattaaggg

SEQ ID NO: 3747 - DNA, 23 bp, Homo sapiens
  source 1..23: mol_type = genomic DNA
ctagataaaattcaattgatagg

SEQ ID NO: 3748 - DNA, 23 bp, Homo sapiens
  source 1..23: mol_type = genomic DNA
attttctttggttatataaaggg

SEQ ID NO: 3749 - DNA, 23 bp, Homo sapiens
  source 1..23: mol_type = genomic DNA
agtcccagttataaattaatggg

SEQ ID NO: 3750 - DNA, 23 bp, Homo sapiens
  source 1..23: mol_type = genomic DNA
gtataccaattgttcagttttgg

SEQ ID NO: 3751 - DNA, 23 bp, Homo sapiens
  source 1..23: mol_type = genomic DNA
ttttatttactgcagctaaaagg

SEQ ID NO: 3752 - DNA, 23 bp, Homo sapiens
  source 1..23: mol_type = genomic DNA
acattttctgtgtcacattaggg

SEQ ID NO: 3753 - DNA, 23 bp, Homo sapiens
  source 1..23: mol_type = genomic DNA
gctctcttcaaatttggtatagg

SEQ ID NO: 3754 - DNA, 23 bp, Homo sapiens
  source 1..23: mol_type = genomic DNA
gcactgtaaggtactttattggg

SEQ ID NO: 3755 - DNA, 23 bp, Homo sapiens
  source 1..23: mol_type = genomic DNA
tgtccccaggaattctataatgg

SEQ ID NO: 3756 - DNA, 23 bp, Homo sapiens
  source 1..23: mol_type = genomic DNA
ttaaaactcaaattatttgtagg

SEQ ID NO: 3757 - DNA, 23 bp, Homo sapiens
  source 1..23: mol_type = genomic DNA
cagggcagagaattgcaaaatgg

SEQ ID NO: 3758 - DNA, 23 bp, Homo sapiens
  source 1..23: mol_type = genomic DNA
catcttgtatgtaattttaaggg

SEQ ID NO: 3759 - DNA, 23 bp, Homo sapiens
  source 1..23: mol_type = genomic DNA
ggaaaatatttcatttttaacgg

SEQ ID NO: 3760 - DNA, 23 bp, Homo sapiens
  source 1..23: mol_type = genomic DNA
gccaccaaagagttttttgatgg

SEQ ID NO: 3761 - DNA, 23 bp, Homo sapiens
  source 1..23: mol_type = genomic DNA
gtttctttcactgtggtaactgg

SEQ ID NO: 3762 - DNA, 23 bp, Homo sapiens
  source 1..23: mol_type = genomic DNA
gcagatttagccaaattaacagg

SEQ ID NO: 3763 - DNA, 23 bp, Homo sapiens
  source 1..23: mol_type = genomic DNA
tttacagaaactcatatataggg

SEQ ID NO: 3764 - DNA, 23 bp, Homo sapiens
  source 1..23: mol_type = genomic DNA
ttactgtcttagaaaagtttagg

SEQ ID NO: 3765 - DNA, 23 bp, Homo sapiens
  source 1..23: mol_type = genomic DNA
aataccagatgccacataaaagg

SEQ ID NO: 3766 - DNA, 23 bp, Homo sapiens
  source 1..23: mol_type = genomic DNA
tcagagggcaagggaaaaaaagg

SEQ ID NO: 3767 - DNA, 23 bp, Homo sapiens
  source 1..23: mol_type = genomic DNA
agatgaacaatccagatataggg

SEQ ID NO: 3768 - DNA, 23 bp, Homo sapiens
  source 1..23: mol_type = genomic DNA
tatagagtagaaatggaaattgg

SEQ ID NO: 3769 - DNA, 23 bp, Homo sapiens
  source 1..23: mol_type = genomic DNA
ctcagtacttaacattttaaggg

SEQ ID NO: 3770 - DNA, 23 bp, Homo sapiens
  source 1..23: mol_type = genomic DNA
aggcattacatggggataaatgg

SEQ ID NO: 3771 - DNA, 23 bp, Homo sapiens
  source 1..23: mol_type = genomic DNA
tctctgctcacaacattaactgg

SEQ ID NO: 3772 - DNA, 23 bp, Homo sapiens
  source 1..23: mol_type = genomic DNA
tgttgttgagaggataaaaaagg

SEQ ID NO: 3773 - DNA, 23 bp, Homo sapiens
  source 1..23: mol_type = genomic DNA
acaaatttgagtaagttatacgg

SEQ ID NO: 3774 - DNA, 23 bp, Homo sapiens
  source 1..23: mol_type = genomic DNA
gcattaagtatccagcaaattgg

SEQ ID NO: 3775 - DNA, 23 bp, Homo sapiens
  source 1..23: mol_type = genomic DNA
gtttactacttatttggttccgg

SEQ ID NO: 3776 - DNA, 23 bp, Homo sapiens
  source 1..23: mol_type = genomic DNA
ccacttttccctaagtcaatagg

SEQ ID NO: 3777 - DNA, 23 bp, Homo sapiens
  source 1..23: mol_type = genomic DNA
ccaagtatctttccaattgcagg

SEQ ID NO: 3778 - DNA, 23 bp, Homo sapiens
  source 1..23: mol_type = genomic DNA
ccttaacttacttaaacaattgg

SEQ ID NO: 3779 - DNA, 23 bp, Homo sapiens
  source 1..23: mol_type = genomic DNA
agaggtagcttttctgtcattgg

SEQ ID NO: 3780 - DNA, 23 bp, Homo sapiens
  source 1..23: mol_type = genomic DNA
ccaggttttgtcaggcactatgg

SEQ ID NO: 3781 - DNA, 23 bp, Homo sapiens
  source 1..23: mol_type = genomic DNA
ttaccatttttgcagatattggg

SEQ ID NO: 3782 - DNA, 23 bp, Homo sapiens
  source 1..23: mol_type = genomic DNA
tgtattgtcaatcttccttctgg

SEQ ID NO: 3783 - DNA, 23 bp, Homo sapiens
  source 1..23: mol_type = genomic DNA
gtaatgactatccctttaaaagg

SEQ ID NO: 3784 - DNA, 23 bp, Homo sapiens
  source 1..23: mol_type = genomic DNA
gattttataaatgagtaatatgg

SEQ ID NO: 3785 - DNA, 23 bp, Homo sapiens
  source 1..23: mol_type = genomic DNA
ttattaaccaacataaaatatgg

SEQ ID NO: 3786 - DNA, 23 bp, Homo sapiens
  source 1..23: mol_type = genomic DNA
catacactctcaaagagatttgg

SEQ ID NO: 3787 - DNA, 23 bp, Homo sapiens
  source 1..23: mol_type = genomic DNA
ttaatttgtaattagtctatagg

SEQ ID NO: 3788 - DNA, 23 bp, Homo sapiens
  source 1..23: mol_type = genomic DNA
gttctatgacaagtgtaaaaagg

SEQ ID NO: 3789 - DNA, 23 bp, Homo sapiens
  source 1..23: mol_type = genomic DNA
tgtactttaatgattctaatagg

SEQ ID NO: 3790 - DNA, 23 bp, Homo sapiens
  source 1..23: mol_type = genomic DNA
ttatgactcctggacattttggg

SEQ ID NO: 3791 - DNA, 23 bp, Homo sapiens
  source 1..23: mol_type = genomic DNA
tatgagaatgggaggataatagg

SEQ ID NO: 3792 - DNA, 23 bp, Homo sapiens
  source 1..23: mol_type = genomic DNA
aggtgggctgccaggtaaattgg

SEQ ID NO: 3793 - DNA, 23 bp, Homo sapiens
  source 1..23: mol_type = genomic DNA
tggaagtgtgaataaaagttagg

SEQ ID NO: 3794 - DNA, 23 bp, Homo sapiens
  source 1..23: mol_type = genomic DNA
tcaagtctacccattcttctagg

SEQ ID NO: 3795 - DNA, 23 bp, Homo sapiens
  source 1..23: mol_type = genomic DNA
tataatctcgacgtacaatttgg

SEQ ID NO: 3796 - DNA, 23 bp, Homo sapiens
  source 1..23: mol_type = genomic DNA
aacacattctgctatatctatgg

SEQ ID NO: 3797 - DNA, 23 bp, Homo sapiens
  source 1..23: mol_type = genomic DNA
aatgtgatattttatcaaattgg

SEQ ID NO: 3798 - DNA, 23 bp, Homo sapiens
  source 1..23: mol_type = genomic DNA
tttaatggcgtaagtaaaactgg

SEQ ID NO: 3799 - DNA, 23 bp, Homo sapiens
  source 1..23: mol_type = genomic DNA
attctgtcataattagtctatgg

SEQ ID NO: 3800 - DNA, 23 bp, Homo sapiens
  source 1..23: mol_type = genomic DNA
ccatggcaggaagatttattggg

SEQ ID NO: 3801 - DNA, 23 bp, Homo sapiens
  source 1..23: mol_type = genomic DNA
ttgtacttaataatagtcttagg

SEQ ID NO: 3802 - DNA, 23 bp, Homo sapiens
  source 1..23: mol_type = genomic DNA
atagaaactcagctgaaataagg

SEQ ID NO: 3803 - DNA, 23 bp, Homo sapiens
  source 1..23: mol_type = genomic DNA
tttgtatcacttaaaacattagg

SEQ ID NO: 3804 - DNA, 23 bp, Homo sapiens
  source 1..23: mol_type = genomic DNA
gtattagatgtaacaaaaattgg

SEQ ID NO: 3805 - DNA, 23 bp, Homo sapiens
  source 1..23: mol_type = genomic DNA
aatcccatttcacttttgatagg

SEQ ID NO: 3806 - DNA, 23 bp, Homo sapiens
  source 1..23: mol_type = genomic DNA
ggattgagctcatttataaaagg

SEQ ID NO: 3807 - DNA, 23 bp, Homo sapiens
  source 1..23: mol_type = genomic DNA
tttctgcatatatagaaaattgg

SEQ ID NO: 3808 - DNA, 23 bp, Homo sapiens
  source 1..23: mol_type = genomic DNA
ccactgttctctataaaatatgg

SEQ ID NO: 3809 - DNA, 23 bp, Homo sapiens
  source 1..23: mol_type = genomic DNA
ttatattgatgaacaggttttgg

SEQ ID NO: 3810 - DNA, 23 bp, Homo sapiens
  source 1..23: mol_type = genomic DNA
ttatatatatacatttctttagg

SEQ ID NO: 3811 - DNA, 23 bp, Homo sapiens
  source 1..23: mol_type = genomic DNA
gtagatgaatgtgatttaaatgg

SEQ ID NO: 3812 - DNA, 23 bp, Homo sapiens
  source 1..23: mol_type = genomic DNA
agaaatccagtaatattaattgg

SEQ ID NO: 3813 - DNA, 23 bp, Homo sapiens
  source 1..23: mol_type = genomic DNA
tagttgtcaaccttcaaaatagg

SEQ ID NO: 3814 - DNA, 23 bp, Homo sapiens
  source 1..23: mol_type = genomic DNA
ttattaagaacaacttttgtagg

SEQ ID NO: 3815 - DNA, 23 bp, Homo sapiens
  source 1..23: mol_type = genomic DNA
gctgaagaatggcaataaaaagg

SEQ ID NO: 3816 - DNA, 23 bp, Homo sapiens
  source 1..23: mol_type = genomic DNA
tatatgggaatctaaataaaagg

SEQ ID NO: 3817 - DNA, 23 bp, Homo sapiens
  source 1..23: mol_type = genomic DNA
gctgttatcgattcggtttaggg

SEQ ID NO: 3818 - DNA, 23 bp, Homo sapiens
  source 1..23: mol_type = genomic DNA
tgtgtattaaatgttaaaattgg

SEQ ID NO: 3819 - DNA, 23 bp, Homo sapiens
  source 1..23: mol_type = genomic DNA
gtatctatcttaggtatatatgg

SEQ ID NO: 3820 - DNA, 23 bp, Homo sapiens
  source 1..23: mol_type = genomic DNA
ttagtgagatgaactgttaatgg

SEQ ID NO: 3821 - DNA, 23 bp, Homo sapiens
  source 1..23: mol_type = genomic DNA
tcttaagcaccaacataaaaagg

SEQ ID NO: 3822 - DNA, 23 bp, Homo sapiens
  source 1..23: mol_type = genomic DNA
acagttacccttactttagatgg

SEQ ID NO: 3823 - DNA, 23 bp, Homo sapiens
  source 1..23: mol_type = genomic DNA
cctttcatcccatttggttatgg

SEQ ID NO: 3824 - DNA, 23 bp, Homo sapiens
  source 1..23: mol_type = genomic DNA
attccttcttttataacaattgg

SEQ ID NO: 3825 - DNA, 23 bp, Homo sapiens
  source 1..23: mol_type = genomic DNA
acaatagatgaacaagaaaatgg

SEQ ID NO: 3826 - DNA, 23 bp, Homo sapiens
  source 1..23: mol_type = genomic DNA
tcaagccaaaaattataaatagg

SEQ ID NO: 3827 - DNA, 23 bp, Homo sapiens
  source 1..23: mol_type = genomic DNA
ttattaatgtatatgtatatagg

SEQ ID NO: 3828 - DNA, 23 bp, Homo sapiens
  source 1..23: mol_type = genomic DNA
agacagagagtagctccttttgg

SEQ ID NO: 3829 - DNA, 23 bp, Homo sapiens
  source 1..23: mol_type = genomic DNA
agaactttaggcagaattaaagg

SEQ ID NO: 3830 - DNA, 23 bp, Homo sapiens
  source 1..23: mol_type = genomic DNA
cttaattcagaaatatatttcgg

SEQ ID NO: 3831 - DNA, 23 bp, Homo sapiens
  source 1..23: mol_type = genomic DNA
ttatcaatgccattagttactgg

SEQ ID NO: 3832 - DNA, 23 bp, Homo sapiens
  source 1..23: mol_type = genomic DNA
gatgctgccatatatgtaattgg

SEQ ID NO: 3833 - DNA, 23 bp, Homo sapiens
  source 1..23: mol_type = genomic DNA
acaaaaggatagttagtaaaagg

SEQ ID NO: 3834 - DNA, 23 bp, Homo sapiens
  source 1..23: mol_type = genomic DNA
ttactcatgtacagagtaaaagg

SEQ ID NO: 3835 - DNA, 23 bp, Homo sapiens
  source 1..23: mol_type = genomic DNA
gctaaagaacaatatataaatgg

SEQ ID NO: 3836 - DNA, 23 bp, Homo sapiens
  source 1..23: mol_type = genomic DNA
ttataaggcatatatttcttagg

SEQ ID NO: 3837 - DNA, 23 bp, Homo sapiens
  source 1..23: mol_type = genomic DNA
gatattgctgagaaaagttttgg

SEQ ID NO: 3838 - DNA, 23 bp, Homo sapiens
  source 1..23: mol_type = genomic DNA
ccttgaatttatgcactaaatgg

SEQ ID NO: 3839 - DNA, 23 bp, Homo sapiens
  source 1..23: mol_type = genomic DNA
tttggcctgtatatacatattgg

SEQ ID NO: 3840 - DNA, 23 bp, Homo sapiens
  source 1..23: mol_type = genomic DNA
gccaagtctacagttctttaggg

SEQ ID NO: 3841 - DNA, 23 bp, Homo sapiens
  source 1..23: mol_type = genomic DNA
ctctgttgtggtttgcttcaggg

SEQ ID NO: 3842 - DNA, 23 bp, Homo sapiens
  source 1..23: mol_type = genomic DNA
tggctcttataataggttattgg

SEQ ID NO: 3843 - DNA, 23 bp, Homo sapiens
  source 1..23: mol_type = genomic DNA
ctaaattttctggccaaataggg

SEQ ID NO: 3844 - DNA, 23 bp, Homo sapiens
  source 1..23: mol_type = genomic DNA
ccagttttcaaaaacattgatgg

SEQ ID NO: 3845 - DNA, 23 bp, Homo sapiens
  source 1..23: mol_type = genomic DNA
aggtaagtaagacagattttagg

SEQ ID NO: 3846 - DNA, 23 bp, Homo sapiens
  source 1..23: mol_type = genomic DNA
cttctagcgcttgtcatataggg

SEQ ID NO: 3847 - DNA, 23 bp, Homo sapiens
  source 1..23: mol_type = genomic DNA
atatgctgtattatatttacagg

SEQ ID NO: 3848 - DNA, 23 bp, Homo sapiens
  source 1..23: mol_type = genomic DNA
gcattgtgcatttaaacttttgg

SEQ ID NO: 3849 - DNA, 23 bp, Homo sapiens
  source 1..23: mol_type = genomic DNA
tgagagtcagagcctgttaatgg

SEQ ID NO: 3850 - DNA, 23 bp, Homo sapiens
  source 1..23: mol_type = genomic DNA
ataaaaataactttattagaagg

SEQ ID NO: 3851 - DNA, 23 bp, Homo sapiens
  source 1..23: mol_type = genomic DNA
tgtccaagtcagaaactctttgg

SEQ ID NO: 3852 - DNA, 23 bp, Homo sapiens
  source 1..23: mol_type = genomic DNA
tttcactctaccaaataaaaagg

SEQ ID NO: 3853 - DNA, 23 bp, Homo sapiens
  source 1..23: mol_type = genomic DNA
gccaagtgtcttccgctaaaagg

SEQ ID NO: 3854 - DNA, 23 bp, Homo sapiens
  source 1..23: mol_type = genomic DNA
tcatattagcattcacttagagg

SEQ ID NO: 3855 - DNA, 23 bp, Homo sapiens
  source 1..23: mol_type = genomic DNA
ggctgtccttgctaattaatggg

SEQ ID NO: 3856 - DNA, 23 bp, Homo sapiens
  source 1..23: mol_type = genomic DNA
gataattcagtgattgtatacgg

SEQ ID NO: 3857 - DNA, 23 bp, Homo sapiens
  source 1..23: mol_type = genomic DNA
ttagacaagcacaacttattagg

SEQ ID NO: 3858 - DNA, 23 bp, Homo sapiens
  source 1..23: mol_type = genomic DNA
atactcagatggacaagttttgg

SEQ ID NO: 3859 - DNA, 23 bp, Homo sapiens
  source 1..23: mol_type = genomic DNA
tatttatcacacatgcaaaaagg

SEQ ID NO: 3860 - DNA, 23 bp, Homo sapiens
  source 1..23: mol_type = genomic DNA
ctatgggcttcctttctaaaagg

SEQ ID NO: 3861 - DNA, 23 bp, Homo sapiens
  source 1..23: mol_type = genomic DNA
ttatactgacgtttattatcagg

SEQ ID NO: 3862 - DNA, 23 bp, Homo sapiens
  source 1..23: mol_type = genomic DNA
gattgtacctttagacttatggg

SEQ ID NO: 3863 - DNA, 23 bp, Homo sapiens
  source 1..23: mol_type = genomic DNA
atagaaattatcccttaaaatgg

SEQ ID NO: 3864 - DNA, 23 bp, Homo sapiens
  source 1..23: mol_type = genomic DNA
tctttctctttcttgttcattgg

SEQ ID NO: 3865 - DNA, 23 bp, Homo sapiens
  source 1..23: mol_type = genomic DNA
agatgtatacttaagatatatgg

SEQ ID NO: 3866 - DNA, 23 bp, Homo sapiens
  source 1..23: mol_type = genomic DNA
tatgtatttttttatttaaaggg

SEQ ID NO: 3867 - DNA, 23 bp, Homo sapiens
  source 1..23: mol_type = genomic DNA
tggactctgaaaacaaaaatagg

SEQ ID NO: 3868 - DNA, 23 bp, Homo sapiens
  source 1..23: mol_type = genomic DNA
gcatgagcatggacagtatttgg

SEQ ID NO: 3869 - DNA, 23 bp, Homo sapiens
  source 1..23: mol_type = genomic DNA
cgtttggaatgaccataaaatgg

SEQ ID NO: 3870 - DNA, 23 bp, Homo sapiens
  source 1..23: mol_type = genomic DNA
atatgtactacgttttttactgg

SEQ ID NO: 3871 - DNA, 23 bp, Homo sapiens
  source 1..23: mol_type = genomic DNA
aatctcatacactagaaaaatgg

SEQ ID NO: 3872 - DNA, 23 bp, Homo sapiens
  source 1..23: mol_type = genomic DNA
cctcctgtaacgtcaattctagg

SEQ ID NO: 3873 - DNA, 23 bp, Homo sapiens
  source 1..23: mol_type = genomic DNA
tagcatgcttaaagctttagagg

SEQ ID NO: 3874 - DNA, 23 bp, Homo sapiens
  source 1..23: mol_type = genomic DNA
acttaatgtacagattttatagg

SEQ ID NO: 3875 - DNA, 23 bp, Homo sapiens
  source 1..23: mol_type = genomic DNA
tgttatataaaaccaaataatgg

SEQ ID NO: 3876 - DNA, 23 bp, Homo sapiens
  source 1..23: mol_type = genomic DNA
ctacttttcatgactctatctgg

SEQ ID NO: 3877 - DNA, 23 bp, Homo sapiens
  source 1..23: mol_type = genomic DNA
ttgagaaacacaactctaaaagg

SEQ ID NO: 3878 - DNA, 23 bp, Homo sapiens
  source 1..23: mol_type = genomic DNA
catggaatcaggactataaaagg

SEQ ID NO: 3879 - DNA, 23 bp, Homo sapiens
  source 1..23: mol_type = genomic DNA
gtaggaatactggcctttactgg

SEQ ID NO: 3880 - DNA, 23 bp, Homo sapiens
  source 1..23: mol_type = genomic DNA
ggtaaattcagcaagattaatgg

SEQ ID NO: 3881 - DNA, 23 bp, Homo sapiens
  source 1..23: mol_type = genomic DNA
cttctatgcttcatttttgatgg

SEQ ID NO: 3882 - DNA, 23 bp, Homo sapiens
  source 1..23: mol_type = genomic DNA
aaattcccattggagaaaaatgg

SEQ ID NO: 3883 - DNA, 23 bp, Homo sapiens
  source 1..23: mol_type = genomic DNA
tctggcctgtgggccataattgg

SEQ ID NO: 3884 - DNA, 23 bp, Homo sapiens
  source 1..23: mol_type = genomic DNA
tccccactagcctcaccatttgg

SEQ ID NO: 3885 - DNA, 23 bp, Homo sapiens
  source 1..23: mol_type = genomic DNA
gtccttttctaaaaaaaataagg

SEQ ID NO: 3886 - DNA, 23 bp, Homo sapiens
  source 1..23: mol_type = genomic DNA
ctaattttatggtcaataattgg

SEQ ID NO: 3887 - DNA, 23 bp, Homo sapiens
  source 1..23: mol_type = genomic DNA
attttgaaccaaattataaatgg

SEQ ID NO: 3888 - DNA, 23 bp, Homo sapiens
  source 1..23: mol_type = genomic DNA
tttatacacaggaataaaaaagg

SEQ ID NO: 3889 - DNA, 23 bp, Homo sapiens
  source 1..23: mol_type = genomic DNA
gttaaacacttattattaaatgg

SEQ ID NO: 3890 - DNA, 23 bp, Homo sapiens
  source 1..23: mol_type = genomic DNA
tgaatggctttccagccttctgg

SEQ ID NO: 3891 - DNA, 23 bp, Homo sapiens
  source 1..23: mol_type = genomic DNA
ctttctgtccaatttataaaagg

SEQ ID NO: 3892 - DNA, 23 bp, Homo sapiens
  source 1..23: mol_type = genomic DNA
tttaaacttacccctcaaaatgg

SEQ ID NO: 3893 - DNA, 23 bp, Homo sapiens
  source 1..23: mol_type = genomic DNA
aatttattggatttaatattggg

SEQ ID NO: 3894 - DNA, 23 bp, Homo sapiens
  source 1..23: mol_type = genomic DNA
tgtgctttactattttctttagg

SEQ ID NO: 3895 - DNA, 23 bp, Homo sapiens
  source 1..23: mol_type = genomic DNA
agtagtgttgtgtaagtaaatgg

SEQ ID NO: 3896 - DNA, 23 bp, Homo sapiens
  source 1..23: mol_type = genomic DNA
ctttatcgaaccttgttaattgg

SEQ ID NO: 3897 - DNA, 23 bp, Homo sapiens
  source 1..23: mol_type = genomic DNA
ttgcatctcctttttcagtatgg

SEQ ID NO: 3898 - DNA, 23 bp, Homo sapiens
  source 1..23: mol_type = genomic DNA
catcatttaccaatattttaggg

SEQ ID NO: 3899 - DNA, 23 bp, Homo sapiens
  source 1..23: mol_type = genomic DNA
ttgtgactctgattatcttatgg

SEQ ID NO: 3900 - DNA, 23 bp, Homo sapiens
  source 1..23: mol_type = genomic DNA
ccattcttcagcatttttactgg

SEQ ID NO: 3901 - DNA, 23 bp, Homo sapiens
  source 1..23: mol_type = genomic DNA
ttaatatctaacctgtttacagg

SEQ ID NO: 3902 - DNA, 23 bp, Homo sapiens
  source 1..23: mol_type = genomic DNA
tgagttatcgttctgttcttagg

SEQ ID NO: 3903 - DNA, 23 bp, Homo sapiens
  source 1..23: mol_type = genomic DNA
tctgtgacagttattaaaaatgg

SEQ ID NO: 3904 - DNA, 23 bp, Homo sapiens
  source 1..23: mol_type = genomic DNA
ccagttacaggcccttttatggg

SEQ ID NO: 3905 - DNA, 23 bp, Homo sapiens
  source 1..23: mol_type = genomic DNA
gagatgatcgatctatgttttgg

SEQ ID NO: 3906 - DNA, 23 bp, Homo sapiens
  source 1..23: mol_type = genomic DNA
tcagccctctaccctaaataagg

SEQ ID NO: 3907 - DNA, 23 bp, Homo sapiens
  source 1..23: mol_type = genomic DNA
gagatctctcagaaaaaaattgg

SEQ ID NO: 3908 - DNA, 23 bp, Homo sapiens
  source 1..23: mol_type = genomic DNA
gcaataatttagattgaaaaagg

SEQ ID NO: 3909 - DNA, 23 bp, Homo sapiens
  source 1..23: mol_type = genomic DNA
ttaaagattccctaaaatattgg

SEQ ID NO: 3910 - DNA, 23 bp, Homo sapiens
  source 1..23: mol_type = genomic DNA
tattgcggcaactttctaaaagg

SEQ ID NO: 3911 - DNA, 23 bp, Homo sapiens
  source 1..23: mol_type = genomic DNA
tcacacaagtaaaattttatagg

SEQ ID NO: 3912 - DNA, 23 bp, Homo sapiens
  source 1..23: mol_type = genomic DNA
ccagaccctcctcttctaaaagg

SEQ ID NO: 3913 - DNA, 23 bp, Homo sapiens
  source 1..23: mol_type = genomic DNA
catataggagacgtaatatatgg

SEQ ID NO: 3914 - DNA, 23 bp, Homo sapiens
  source 1..23: mol_type = genomic DNA
ataaaacccattaaaattttggg

SEQ ID NO: 3915 - DNA, 23 bp, Homo sapiens
  source 1..23: mol_type = genomic DNA
ataaagatgtaagtagaatatgg

SEQ ID NO: 3916 - DNA, 23 bp, Homo sapiens
  source 1..23: mol_type = genomic DNA
ccttggacttgcttctaatatgg

SEQ ID NO: 3917 - DNA, 23 bp, Homo sapiens
  source 1..23: mol_type = genomic DNA
tataaaacaaacatattaaaagg

SEQ ID NO: 3918 - DNA, 23 bp, Homo sapiens
  source 1..23: mol_type = genomic DNA
atatcaatataaaagttaattgg

SEQ ID NO: 3919 - DNA, 23 bp, Homo sapiens
  source 1..23: mol_type = genomic DNA
ccacaatcaggacagtaatttgg

SEQ ID NO: 3920 - DNA, 23 bp, Homo sapiens
  source 1..23: mol_type = genomic DNA
tcttaagagcacatacttatagg

SEQ ID NO: 3921 - DNA, 23 bp, Homo sapiens
  source 1..23: mol_type = genomic DNA
gcatgaccatgcaaactttcagg

SEQ ID NO: 3922 - DNA, 23 bp, Homo sapiens
  source 1..23: mol_type = genomic DNA
gtagatggcttaatgggttttgg

SEQ ID NO: 3923 - DNA, 23 bp, Homo sapiens
  source 1..23: mol_type = genomic DNA
ttcagtctcttgagatttacagg

SEQ ID NO: 3924 - DNA, 23 bp, Homo sapiens
  source 1..23: mol_type = genomic DNA
tttatgctccattagcaaattgg

SEQ ID NO: 3925 - DNA, 23 bp, Homo sapiens
  source 1..23: mol_type = genomic DNA
cacacaagtgaaaattaaattgg

SEQ ID NO: 3926 - DNA, 23 bp, Homo sapiens
  source 1..23: mol_type = genomic DNA
ctttgagagcaaacaaaaattgg

SEQ ID NO: 3927 - DNA, 23 bp, Homo sapiens
  source 1..23: mol_type = genomic DNA
acatagagcttcatacttactgg

SEQ ID NO: 3928 - DNA, 23 bp, Homo sapiens
  source 1..23: mol_type = genomic DNA
gcaactgctaccacagttaaagg

SEQ ID NO: 3929 - DNA, 23 bp, Homo sapiens
  source 1..23: mol_type = genomic DNA
gtattacattcattgataaatgg

SEQ ID NO: 3930 - DNA, 23 bp, Homo sapiens
  source 1..23: mol_type = genomic DNA
aagtgtcacttgaaataaaaagg

SEQ ID NO: 3931 - DNA, 23 bp, Homo sapiens
  source 1..23: mol_type = genomic DNA
ctttttttcctttctgtaaaggg

SEQ ID NO: 3932 - DNA, 23 bp, Homo sapiens
  source 1..23: mol_type = genomic DNA
gcaaaaatctgtatgcattaagg

SEQ ID NO: 3933 - DNA, 23 bp, Homo sapiens
  source 1..23: mol_type = genomic DNA
gaaaaccaagagcttattaaagg

SEQ ID NO: 3934 - DNA, 23 bp, Homo sapiens
  source 1..23: mol_type = genomic DNA
ttttcaggctcttcataaatagg

SEQ ID NO: 3935 - DNA, 23 bp, Homo sapiens
  source 1..23: mol_type = genomic DNA
tctaatctgcattaaataaaagg

SEQ ID NO: 3936 - DNA, 23 bp, Homo sapiens
  source 1..23: mol_type = genomic DNA
tacatactgcaaataataattgg

SEQ ID NO: 3937 - DNA, 23 bp, Homo sapiens
  source 1..23: mol_type = genomic DNA
tcttccttgagtccagttaaagg

SEQ ID NO: 3938 - DNA, 23 bp, Homo sapiens
  source 1..23: mol_type = genomic DNA
ggaaaaagctgggagttaattgg

SEQ ID NO: 3939 - DNA, 23 bp, Homo sapiens
  source 1..23: mol_type = genomic DNA
tgttctacgtatttcaaaaatgg

SEQ ID NO: 3940 - DNA, 23 bp, Homo sapiens
  source 1..23: mol_type = genomic DNA
tggtgtcaagatattaaaattgg

SEQ ID NO: 3941 - DNA, 23 bp, Homo sapiens
  source 1..23: mol_type = genomic DNA
ttatgccactggattaaaaaagg

SEQ ID NO: 3942 - DNA, 23 bp, Homo sapiens
  source 1..23: mol_type = genomic DNA
gatttagtattgtaaaaaaatgg

SEQ ID NO: 3943 - DNA, 23 bp, Homo sapiens
  source 1..23: mol_type = genomic DNA
tttgaatgcaaaacacttagagg

SEQ ID NO: 3944 - DNA, 23 bp, Homo sapiens
  source 1..23: mol_type = genomic DNA
tctctagtacttaagtagtatgg

SEQ ID NO: 3945 - DNA, 23 bp, Homo sapiens
  source 1..23: mol_type = genomic DNA
ctccctgccatagttttaaatgg

SEQ ID NO: 3946 - DNA, 23 bp, Homo sapiens
  source 1..23: mol_type = genomic DNA
aatcccttagtataaatctttgg

SEQ ID NO: 3947 - DNA, 23 bp, Homo sapiens
  source 1..23: mol_type = genomic DNA
tttggtgacacaagtaaaaatgg

SEQ ID NO: 3948 - DNA, 23 bp, Homo sapiens
  source 1..23: mol_type = genomic DNA
gtattttgcaacagtataatagg

SEQ ID NO: 3949 - DNA, 23 bp, Homo sapiens
  source 1..23: mol_type = genomic DNA
gtttgggcttttgtgttaattgg

SEQ ID NO: 3950 - DNA, 23 bp, Homo sapiens
  source 1..23: mol_type = genomic DNA
ctagggctagggcaattaattgg

SEQ ID NO: 3951 - DNA, 23 bp, Homo sapiens
  source 1..23: mol_type = genomic DNA
gctcggctatttttaggtttggg

SEQ ID NO: 3952 - DNA, 23 bp, Homo sapiens
  source 1..23: mol_type = genomic DNA
gtatttatatttgtcttctatgg

SEQ ID NO: 3953 - DNA, 23 bp, Homo sapiens
  source 1..23: mol_type = genomic DNA
gcagagaacaacaattttaatgg

SEQ ID NO: 3954 - DNA, 23 bp, Homo sapiens
  source 1..23: mol_type = genomic DNA
tgatggatgttcttgtttattgg

SEQ ID NO: 3955 - DNA, 23 bp, Homo sapiens
  source 1..23: mol_type = genomic DNA
tgtcatttctagtacttaattgg

SEQ ID NO: 3956 - DNA, 23 bp, Homo sapiens
  source 1..23: mol_type = genomic DNA
gttacagcaatgggtcttaatgg

SEQ ID NO: 3957 - DNA, 23 bp, Homo sapiens
  source 1..23: mol_type = genomic DNA
tggaattcatgtattataaaagg

SEQ ID NO: 3958 - DNA, 23 bp, Homo sapiens
  source 1..23: mol_type = genomic DNA
attaccatttcaactctaaatgg

SEQ ID NO: 3959 - DNA, 23 bp, Homo sapiens
  source 1..23: mol_type = genomic DNA
gcaaaacgagtgccaatatttgg

SEQ ID NO: 3960 - DNA, 23 bp, Homo sapiens
  source 1..23: mol_type = genomic DNA
attgacttcaatctttaatatgg

SEQ ID NO: 3961 - DNA, 23 bp, Homo sapiens
  source 1..23: mol_type = genomic DNA
acaaggagaaccaaattatttgg

SEQ ID NO: 3962 - DNA, 23 bp, Homo sapiens
  source 1..23: mol_type = genomic DNA
gcactagaggttactataaatgg

SEQ ID NO: 3963 - DNA, 23 bp, Homo sapiens
  source 1..23: mol_type = genomic DNA
tcacattcccttgtaaaaaaagg

SEQ ID NO: 3964 - DNA, 23 bp, Homo sapiens
  source 1..23: mol_type = genomic DNA
agtcagtgctccttatttaaagg

SEQ ID NO: 3965 - DNA, 23 bp, Homo sapiens
  source 1..23: mol_type = genomic DNA
tcacaatcccactttttctttgg

SEQ ID NO: 3966 - DNA, 23 bp, Homo sapiens
  source 1..23: mol_type = genomic DNA
tcataagctaattattaaattgg

SEQ ID NO: 3967 - DNA, 23 bp, Homo sapiens
  source 1..23: mol_type = genomic DNA
tcatttcaatccacaaaaatagg

SEQ ID NO: 3968 - DNA, 23 bp, Homo sapiens
  source 1..23: mol_type = genomic DNA
atatacacacaagaaattttagg

SEQ ID NO: 3969 - DNA, 23 bp, Homo sapiens
  source 1..23: mol_type = genomic DNA
gattgcttcttgcctgaaattgg

SEQ ID NO: 3970 - DNA, 23 bp, Homo sapiens
  source 1..23: mol_type = genomic DNA
gcagtactcaacaaagtaattgg

SEQ ID NO: 3971 - DNA, 23 bp, Homo sapiens
  source 1..23: mol_type = genomic DNA
aggctgtccttgctaattaatgg

SEQ ID NO: 3972 - DNA, 23 bp, Homo sapiens
  source 1..23: mol_type = genomic DNA
ggttatgtatattataaattagg

SEQ ID NO: 3973 - DNA, 23 bp, Homo sapiens
  source 1..23: mol_type = genomic DNA
gccgtcctcttaccaatttcagg

SEQ ID NO: 3974 - DNA, 23 bp, Homo sapiens
  source 1..23: mol_type = genomic DNA
tggcatacggagatcaaaattgg

SEQ ID NO: 3975 - DNA, 23 bp, Homo sapiens
  source 1..23: mol_type = genomic DNA
ataacttgtttggtgaaaaatgg

SEQ ID NO: 3976 - DNA, 23 bp, Homo sapiens
  source 1..23: mol_type = genomic DNA
tttcaattcatgccaattatagg

SEQ ID NO: 3977 - DNA, 23 bp, Homo sapiens
  source 1..23: mol_type = genomic DNA
ctaactccagtttatcatttagg

SEQ ID NO: 3978 - DNA, 23 bp, Homo sapiens
  source 1..23: mol_type = genomic DNA
tatctgactctaaataaatttgg

SEQ ID NO: 3979 - DNA, 23 bp, Homo sapiens
  source 1..23: mol_type = genomic DNA
gcagagacttcaattttttatgg

SEQ ID NO: 3980 - DNA, 23 bp, Homo sapiens
  source 1..23: mol_type = genomic DNA
aatcaaagataacaccacagggg

SEQ ID NO: 3981 - DNA, 23 bp, Homo sapiens
  source 1..23: mol_type = genomic DNA
aagatggtagatgaatgcaatgg

SEQ ID NO: 3982 - DNA, 23 bp, Homo sapiens
  source 1..23: mol_type = genomic DNA
gtatgaagcagaaaccacgaagg

SEQ ID NO: 3983 - DNA, 23 bp, Homo sapiens
  source 1..23: mol_type = genomic DNA
tatagtatgtcctaccacggggg

SEQ ID NO: 3984 - DNA, 23 bp, Homo sapiens
  source 1..23: mol_type = genomic DNA
atagagatcagaaagcccagtgg

SEQ ID NO: 3985 - DNA, 23 bp, Homo sapiens
  source 1..23: mol_type = genomic DNA
agggtactagtgtaagacagggg

SEQ ID NO: 3986 - DNA, 23 bp, Homo sapiens
  source 1..23: mol_type = genomic DNA
aagtggagaaaagttcagagggg

SEQ ID NO: 3987 - DNA, 23 bp, Homo sapiens
  source 1..23: mol_type = genomic DNA
tcaaagattcaacaacactgtgg

SEQ ID NO: 3988 - DNA, 23 bp, Homo sapiens
  source 1..23: mol_type = genomic DNA
ggggcatcagaaacacacaatgg

SEQ ID NO: 3989 - DNA, 23 bp, Homo sapiens
  source 1..23: mol_type = genomic DNA
gaagttaagagcaagcactgagg

SEQ ID NO: 3990 - DNA, 23 bp, Homo sapiens
  source 1..23: mol_type = genomic DNA
gtaacatgtacccaacaatgtgg

SEQ ID NO: 3991 - DNA, 23 bp, Homo sapiens
  source 1..23: mol_type = genomic DNA
acactgagagtggaacacaaagg

SEQ ID NO: 3992 - DNA, 23 bp, Homo sapiens
  source 1..23: mol_type = genomic DNA
atatgctttggaaaacacggggg

SEQ ID NO: 3993 - DNA, 23 bp, Homo sapiens
  source 1..23: mol_type = genomic DNA
aggcatgggaagtaacacgtagg

SEQ ID NO: 3994 - DNA, 23 bp, Homo sapiens
  source 1..23: mol_type = genomic DNA
ttcactgtgtgtgatccatgggg

SEQ ID NO: 3995 - DNA, 23 bp, Homo sapiens
  source 1..23: mol_type = genomic DNA
atctccctaagcatacagggtgg

SEQ ID NO: 3996 - DNA, 23 bp, Homo sapiens
  source 1..23: mol_type = genomic DNA
ggtgaatgcagatggtacagagg

SEQ ID NO: 3997 - DNA, 23 bp, Homo sapiens
  source 1..23: mol_type = genomic DNA
ggttagccctcaaggcaacgtgg

SEQ ID NO: 3998 - DNA, 23 bp, Homo sapiens
  source 1..23: mol_type = genomic DNA
tgaatgggaaaccatcagagagg

SEQ ID NO: 3999 - DNA, 23 bp, Homo sapiens
  source 1..23: mol_type = genomic DNA
tttgtcatagagtatacacgagg

SEQ ID NO: 4000 - DNA, 23 bp, Homo sapiens
  source 1..23: mol_type = genomic DNA
atgacaaagtaaaatcacagtgg

SEQ ID NO: 4001 - DNA, 23 bp, Homo sapiens
  source 1..23: mol_type = genomic DNA
tgtacggtcaagaaacatggtgg

SEQ ID NO: 4002 - DNA, 23 bp, Homo sapiens
  source 1..23: mol_type = genomic DNA
tagatattactcactcagggagg

SEQ ID NO: 4003 - DNA, 23 bp, Homo sapiens
  source 1..23: mol_type = genomic DNA
attggagactgtattcaccacgg

SEQ ID NO: 4004 - DNA, 23 bp, Homo sapiens
  source 1..23: mol_type = genomic DNA
aaggggttgagggaaagccgagg

SEQ ID NO: 4005 - DNA, 23 bp, Homo sapiens
  source 1..23: mol_type = genomic DNA
gtaaaggggataataccctgagg

SEQ ID NO: 4006 - DNA, 23 bp, Homo sapiens
  source 1..23: mol_type = genomic DNA
tatcatgagaaagacatgtgcgg

SEQ ID NO: 4007 - DNA, 23 bp, Homo sapiens
  source 1..23: mol_type = genomic DNA
cacccttaagtgaagcacagagg

SEQ ID NO: 4008 - DNA, 23 bp, Homo sapiens
  source 1..23: mol_type = genomic DNA
acagtggtttccctgcatggagg

SEQ ID NO: 4009 - DNA, 23 bp, Homo sapiens
  source 1..23: mol_type = genomic DNA
gcaaacccactcctacacgaagg

SEQ ID NO: 4010 - DNA, 23 bp, Homo sapiens
  source 1..23: mol_type = genomic DNA
atatagtatgtcctaccacgggg

SEQ ID NO: 4011 - DNA, 23 bp, Homo sapiens
  source 1..23: mol_type = genomic DNA
ggagaagtgaagaaacatggagg

SEQ ID NO: 4012 - DNA, 23 bp, Homo sapiens
  source 1..23: mol_type = genomic DNA
actgaacaaagcactcccgtagg

SEQ ID NO: 4013 - DNA, 23 bp, Homo sapiens
  source 1..23: mol_type = genomic DNA
tgaaatgtctccattcaatgtgg

SEQ ID NO: 4014 - DNA, 23 bp, Homo sapiens
  source 1..23: mol_type = genomic DNA
tggtattgctagtagaacggtgg

SEQ ID NO: 4015 - DNA, 23 bp, Homo sapiens
  source 1..23: mol_type = genomic DNA
gatatgggagttaagattcgggg

SEQ ID NO: 4016 - DNA, 23 bp, Homo sapiens
  source 1..23: mol_type = genomic DNA
tttgactgaatagaaagtggtgg

SEQ ID NO: 4017 - DNA, 23 bp, Homo sapiens
  source 1..23: mol_type = genomic DNA
cctatgagaagcaggcagggggg

SEQ ID NO: 4018 - DNA, 23 bp, Homo sapiens
  source 1..23: mol_type = genomic DNA
accacaacagagaaggttggggg

SEQ ID NO: 4019 - DNA, 23 bp, Homo sapiens
  source 1..23: mol_type = genomic DNA
tcttctgtcaaaagtcacagagg

SEQ ID NO: 4020 - DNA, 23 bp, Homo sapiens
  source 1..23: mol_type = genomic DNA
atgatggtgaaactggcggtggg

SEQ ID NO: 4021 - DNA, 23 bp, Homo sapiens
  source 1..23: mol_type = genomic DNA
ttagagatattgtacccctgtgg

SEQ ID NO: 4022 - DNA, 23 bp, Homo sapiens
  source 1..23: mol_type = genomic DNA
catgtacatacagttctacgagg

SEQ ID NO: 4023 - DNA, 23 bp, Homo sapiens
  source 1..23: mol_type = genomic DNA
tgcctgtgtgtatgtgaacgagg

SEQ ID NO: 4024 - DNA, 23 bp, Homo sapiens
  source 1..23: mol_type = genomic DNA
aagatagcctcgcagcacagtgg

SEQ ID NO: 4025 - DNA, 23 bp, Homo sapiens
  source 1..23: mol_type = genomic DNA
atgaatgatggtgaaactggcgg

SEQ ID NO: 4026 - DNA, 23 bp, Homo sapiens
  source 1..23: mol_type = genomic DNA
aaggaaatataagcccaacacgg

SEQ ID NO: 4027 - DNA, 23 bp, Homo sapiens
  source 1..23: mol_type = genomic DNA
gaattgcacacacacacacgcgg

SEQ ID NO: 4028 - DNA, 23 bp, Homo sapiens
  source 1..23: mol_type = genomic DNA
ggacgcgtcagtaaaactggtgg

SEQ ID NO: 4029 - DNA, 23 bp, Homo sapiens
  source 1..23: mol_type = genomic DNA
tctctgttatgagtccacaaagg

SEQ ID NO: 4030 - DNA, 23 bp, Homo sapiens
  source 1..23: mol_type = genomic DNA
ggggccacttttaaactaggggg

SEQ ID NO: 4031 - DNA, 23 bp, Homo sapiens
  source 1..23: mol_type = genomic DNA
aatttattgaaccctcaaagggg

SEQ ID NO: 4032 - DNA, 23 bp, Homo sapiens
  source 1..23: mol_type = genomic DNA
ataaaacattcaatcccacatgg

SEQ ID NO: 4033 - DNA, 23 bp, Homo sapiens
  source 1..23: mol_type = genomic DNA
ctgcaacatcaaaaacagagagg

SEQ ID NO: 4034 - DNA, 23 bp, Homo sapiens
  source 1..23: mol_type = genomic DNA
tcccttgtccaagagccctgtgg

SEQ ID NO: 4035 - DNA, 23 bp, Homo sapiens
  source 1..23: mol_type = genomic DNA
gaacttggtaaagaccaagaggg

SEQ ID NO: 4036 - DNA, 23 bp, Homo sapiens
  source 1..23: mol_type = genomic DNA
aattctaaatgataaccacaggg

SEQ ID NO: 4037 - DNA, 23 bp, Homo sapiens
  source 1..23: mol_type = genomic DNA
aaaagatgatggaatccctgagg

SEQ ID NO: 4038 - DNA, 23 bp, Homo sapiens
  source 1..23: mol_type = genomic DNA
agatacactcggaattagtgggg

SEQ ID NO: 4039 - DNA, 23 bp, Homo sapiens
  source 1..23: mol_type = genomic DNA
atgtaactaagcatttagagggg

SEQ ID NO: 4040 - DNA, 23 bp, Homo sapiens
  source 1..23: mol_type = genomic DNA
ataaagatactaagccctcgggg

SEQ ID NO: 4041 - DNA, 23 bp, Homo sapiens
  source 1..23: mol_type = genomic DNA
gtggtgatagttctaaaacaggg

SEQ ID NO: 4042 - DNA, 23 bp, Homo sapiens
  source 1..23: mol_type = genomic DNA
atcactattaaagaagacgacgg

SEQ ID NO: 4043 - DNA, 23 bp, Homo sapiens
  source 1..23: mol_type = genomic DNA
attaggtataattatcactgtgg

SEQ ID NO: 4044 - DNA, 23 bp, Homo sapiens
  source 1..23: mol_type = genomic DNA
tcttacataatgttcaaacaggg

SEQ ID NO: 4045 - DNA, 23 bp, Homo sapiens
  source 1..23: mol_type = genomic DNA
gtgatagcctttggtcaacgggg

SEQ ID NO: 4046 - DNA, 23 bp, Homo sapiens
  source 1..23: mol_type = genomic DNA
tgtatgcgtatgtccaacagagg

SEQ ID NO: 4047 - DNA, 23 bp, Homo sapiens
  source 1..23: mol_type = genomic DNA
aagtggggtcaagagcctgtggg

SEQ ID NO: 4048 - DNA, 23 bp, Homo sapiens
  source 1..23: mol_type = genomic DNA
atacataaaacggaaaactgagg

SEQ ID NO: 4049 - DNA, 23 bp, Homo sapiens
  source 1..23: mol_type = genomic DNA
ctgtgtgtatgtgaacgaggagg

SEQ ID NO: 4050 - DNA, 23 bp, Homo sapiens
  source 1..23: mol_type = genomic DNA
tgcctcctattataccctagggg

SEQ ID NO: 4051 - DNA, 23 bp, Homo sapiens
  source 1..23: mol_type = genomic DNA
atagtggtgtcagatgagaaggg

SEQ ID NO: 4052 - DNA, 23 bp, Homo sapiens
  source 1..23: mol_type = genomic DNA
atagcagccagacaaaacagagg

SEQ ID NO: 4053 - DNA, 23 bp, Homo sapiens
  source 1..23: mol_type = genomic DNA
tctatctctttaggaccaggggg

SEQ ID NO: 4054 - DNA, 23 bp, Homo sapiens
  source 1..23: mol_type = genomic DNA
tgtattctgtaattgctaggggg

SEQ ID NO: 4055 - DNA, 23 bp, Homo sapiens
  source 1..23: mol_type = genomic DNA
ctcatgtacctggaaatgagtgg

SEQ ID NO: 4056 - DNA, 23 bp, Homo sapiens
  source 1..23: mol_type = genomic DNA
gtagaaacagaagaaaaactggg

SEQ ID NO: 4057 - DNA, 23 bp, Homo sapiens
  source 1..23: mol_type = genomic DNA
ataggctgaaagctccaacaggg

SEQ ID NO: 4058 - DNA, 23 bp, Homo sapiens
  source 1..23: mol_type = genomic DNA
tttgaggtacaacagaccgaagg

SEQ ID NO: 4059 - DNA, 23 bp, Homo sapiens
  source 1..23: mol_type = genomic DNA
gctaatgataatctagacagagg

SEQ ID NO: 4060 - DNA, 23 bp, Homo sapiens
  source 1..23: mol_type = genomic DNA
tgagcagaaactgtatacagagg

SEQ ID NO: 4061 - DNA, 23 bp, Homo sapiens
  source 1..23: mol_type = genomic DNA
tgtcttgctatgaaacctagagg

SEQ ID NO: 4062 - DNA, 23 bp, Homo sapiens
  source 1..23: mol_type = genomic DNA
aatgtgacagatatcacatgagg

SEQ ID NO: 4063 - DNA, 23 bp, Homo sapiens
  source 1..23: mol_type = genomic DNA
tagacgaatggaggtacacgagg

SEQ ID NO: 4064 - DNA, 23 bp, Homo sapiens
  source 1..23: mol_type = genomic DNA
aaaatgaacacagactgcagagg

SEQ ID NO: 4065 - DNA, 23 bp, Homo sapiens
  source 1..23: mol_type = genomic DNA
agtgaagactcaataacaggtgg

SEQ ID NO: 4066 - DNA, 23 bp, Homo sapiens
  source 1..23: mol_type = genomic DNA
gaataggtacagattcagagtgg

SEQ ID NO: 4067 - DNA, 23 bp, Homo sapiens
  source 1..23: mol_type = genomic DNA
gaggaaataagaaattcaagcgg

SEQ ID NO: 4068 - DNA, 23 bp, Homo sapiens
  source 1..23: mol_type = genomic DNA
aagccattaaaacccctcagagg

SEQ ID NO: 4069 - DNA, 23 bp, Homo sapiens
  source 1..23: mol_type = genomic DNA
aagtcagaaacacatgtgtgtgg

SEQ ID NO: 4070 - DNA, 23 bp, Homo sapiens
  source 1..23: mol_type = genomic DNA
acagaaagttggaaccaaagggg

SEQ ID NO: 4071 - DNA, 23 bp, Homo sapiens
  source 1..23: mol_type = genomic DNA
ggaatgcataaacacatgggagg

SEQ ID NO: 4072 - DNA, 23 bp, Homo sapiens
  source 1..23: mol_type = genomic DNA
gtttggtaaatgcatcaccaagg

SEQ ID NO: 4073 - DNA, 23 bp, Homo sapiens
  source 1..23: mol_type = genomic DNA
aatatgctttggaaaacacgggg

SEQ ID NO: 4074 - DNA, 23 bp, Homo sapiens
  source 1..23: mol_type = genomic DNA
gatgggaaccagtctctaggtgg

SEQ ID NO: 4075 - DNA, 23 bp, Homo sapiens
  source 1..23: mol_type = genomic DNA
tatcaccacaggcttcccagcgg

SEQ ID NO: 4076 - DNA, 23 bp, Homo sapiens
  source 1..23: mol_type = genomic DNA
agagaaatgcttcctcagtgagg

SEQ ID NO: 4077 - DNA, 23 bp, Homo sapiens
  source 1..23: mol_type = genomic DNA
ctactgttaagacacaggatggg

SEQ ID NO: 4078 - DNA, 23 bp, Homo sapiens
  source 1..23: mol_type = genomic DNA
catggttttcatgaactgggcgg

SEQ ID NO: 4079 - DNA, 23 bp, Homo sapiens
  source 1..23: mol_type = genomic DNA
taaacatcagaagacctcaaggg

SEQ ID NO: 4080 - DNA, 23 bp, Homo sapiens
  source 1..23: mol_type = genomic DNA
attcataagatcaatgactgtgg

SEQ ID NO: 4081 - DNA, 23 bp, Homo sapiens
  source 1..23: mol_type = genomic DNA
gttcaataaattcctcagtgggg

SEQ ID NO: 4082 - DNA, 23 bp, Homo sapiens
  source 1..23: mol_type = genomic DNA
gagagaccgcaagatcaggaggg

SEQ ID NO: 4083 - DNA, 23 bp, Homo sapiens
  source 1..23: mol_type = genomic DNA
tatgggatcaaagcatccagagg

SEQ ID NO: 4084 - DNA, 23 bp, Homo sapiens
  source 1..23: mol_type = genomic DNA
gtttccgtactcccctagtgggg

SEQ ID NO: 4085 - DNA, 23 bp, Homo sapiens
  source 1..23: mol_type = genomic DNA
tatagattagaaaaaaatcgggg

SEQ ID NO: 4086 - DNA, 23 bp, Homo sapiens
  source 1..23: mol_type = genomic DNA
aaatataccgaattgctctgagg

SEQ ID NO: 4087 - DNA, 23 bp, Homo sapiens
  source 1..23: mol_type = genomic DNA
gcaagaggaagaacacgttgagg

SEQ ID NO: 4088 - DNA, 23 bp, Homo sapiens
  source 1..23: mol_type = genomic DNA
taatctcagaaatgccacaacgg

SEQ ID NO: 4089 - DNA, 23 bp, Homo sapiens
  source 1..23: mol_type = genomic DNA
gtttattttctctttctgcgagg

SEQ ID NO: 4090 - DNA, 23 bp, Homo sapiens
  source 1..23: mol_type = genomic DNA
gggtgggaaaggtttcagaaagg

SEQ ID NO: 4091 - DNA, 23 bp, Homo sapiens
  source 1..23: mol_type = genomic DNA
gccttgggaaatgaataggtggg

SEQ ID NO: 4092 - DNA, 23 bp, Homo sapiens
  source 1..23: mol_type = genomic DNA
agaggaatgcataaacacatggg

SEQ ID NO: 4093 - DNA, 23 bp, Homo sapiens
  source 1..23: mol_type = genomic DNA
tgtgtgtgtacatatatgggtgg

SEQ ID NO: 4094 - DNA, 23 bp, Homo sapiens
  source 1..23: mol_type = genomic DNA
gcagggaacaatgatacctgcgg

SEQ ID NO: 4095 - DNA, 23 bp, Homo sapiens
  source 1..23: mol_type = genomic DNA
ctatgaaaacatgcactgggtgg

SEQ ID NO: 4096 - DNA, 23 bp, Homo sapiens
  source 1..23: mol_type = genomic DNA
ggtaggaatgcatttcccagagg

SEQ ID NO: 4097 - DNA, 23 bp, Homo sapiens
  source 1..23: mol_type = genomic DNA
ggataaacattagctctgtgtgg

SEQ ID NO: 4098 - DNA, 23 bp, Homo sapiens
  source 1..23: mol_type = genomic DNA
gcacagttgagactacaccttgg

SEQ ID NO: 4099 - DNA, 23 bp, Homo sapiens
  source 1..23: mol_type = genomic DNA
agattaagagaaaaaaaacacgg

SEQ ID NO: 4100 - DNA, 23 bp, Homo sapiens
  source 1..23: mol_type = genomic DNA
aaatgctcgcttactcacagagg

SEQ ID NO: 4101 - DNA, 23 bp, Homo sapiens
  source 1..23: mol_type = genomic DNA
agcgttctctatctccacaaagg

SEQ ID NO: 4102 - DNA, 23 bp, Homo sapiens
  source 1..23: mol_type = genomic DNA
ctcctcgttcacatacacacagg

SEQ ID NO: 4103 - DNA, 23 bp, Homo sapiens
  source 1..23: mol_type = genomic DNA
tctagatagtatttccgtggggg

SEQ ID NO: 4104 - DNA, 23 bp, Homo sapiens
  source 1..23: mol_type = genomic DNA
ttgttactgacttatctgagagg

SEQ ID NO: 4105 - DNA, 23 bp, Homo sapiens
  source 1..23: mol_type = genomic DNA
tatcaaggtctcgatcgagaggg

SEQ ID NO: 4106 - DNA, 23 bp, Homo sapiens
  source 1..23: mol_type = genomic DNA
tcatacagaaaggactcaggagg

SEQ ID NO: 4107 - DNA, 23 bp, Homo sapiens
  source 1..23: mol_type = genomic DNA
ccaagcaaagcaccaaacagtgg

SEQ ID NO: 4108 - DNA, 23 bp, Homo sapiens
  source 1..23: mol_type = genomic DNA
gcaaaatgtcttaacactagggg

SEQ ID NO: 4109 - DNA, 23 bp, Homo sapiens
  source 1..23: mol_type = genomic DNA
caactaagatagacacaaagggg

SEQ ID NO: 4110 - DNA, 23 bp, Homo sapiens
  source 1..23: mol_type = genomic DNA
tttgcatgaagcattagtggtgg

SEQ ID NO: 4111 - DNA, 23 bp, Homo sapiens
  source 1..23: mol_type = genomic DNA
gaactgttggtgaagcagagagg

SEQ ID NO: 4112 - DNA, 23 bp, Homo sapiens
  source 1..23: mol_type = genomic DNA
tcatagaaaaggattcaggaggg

SEQ ID NO: 4113 - DNA, 23 bp, Homo sapiens
  source 1..23: mol_type = genomic DNA
gtaatgttatgaaagaaaggggg

SEQ ID NO: 4114 - DNA, 23 bp, Homo sapiens
  source 1..23: mol_type = genomic DNA
ttacacataaatatgaacgatgg

SEQ ID NO: 4115 - DNA, 23 bp, Homo sapiens
  source 1..23: mol_type = genomic DNA
gctgggaattacctcatgagggg

SEQ ID NO: 4116 - DNA, 23 bp, Homo sapiens
  source 1..23: mol_type = genomic DNA
tgagttctgtggcctcactgagg

SEQ ID NO: 4117 - DNA, 23 bp, Homo sapiens
  source 1..23: mol_type = genomic DNA
aatctacctaaaattcacagagg

SEQ ID NO: 4118 - DNA, 23 bp, Homo sapiens
  source 1..23: mol_type = genomic DNA
agttgctgtggaaaaaccagagg

SEQ ID NO: 4119 - DNA, 23 bp, Homo sapiens
  source 1..23: mol_type = genomic DNA
caaatttaatcacctctgagggg

SEQ ID NO: 4120 - DNA, 23 bp, Homo sapiens
  source 1..23: mol_type = genomic DNA
atatgcatcactcaataccatgg

SEQ ID NO: 4121 - DNA, 23 bp, Homo sapiens
  source 1..23: mol_type = genomic DNA
aaaacagttagatggtaccaggg

SEQ ID NO: 4122 - DNA, 23 bp, Homo sapiens
  source 1..23: mol_type = genomic DNA
tctcctggtagcaaacaatgagg

SEQ ID NO: 4123 - DNA, 23 bp, Homo sapiens
  source 1..23: mol_type = genomic DNA
caataagtaatacagtatagggg

SEQ ID NO: 4124 - DNA, 23 bp, Homo sapiens
  source 1..23: mol_type = genomic DNA
tgcacaccagctatacacacagg

SEQ ID NO: 4125 - DNA, 23 bp, Homo sapiens
  source 1..23: mol_type = genomic DNA
gtgacttcatgataaaaaggggg

SEQ ID NO: 4126 - DNA, 23 bp, Homo sapiens
  source 1..23: mol_type = genomic DNA
cagaataagaaagcactaggggg

SEQ ID NO: 4127 - DNA, 23 bp, Homo sapiens
  source 1..23: mol_type = genomic DNA
tagtgtttgattgaggacggagg

SEQ ID NO: 4128 - DNA, 23 bp, Homo sapiens
  source 1..23: mol_type = genomic DNA
ttatctttagaaatgactggggg

SEQ ID NO: 4129 - DNA, 23 bp, Homo sapiens
  source 1..23: mol_type = genomic DNA
gagtgtgttcctgagaggagggg

SEQ ID NO: 4130 - DNA, 23 bp, Homo sapiens
  source 1..23: mol_type = genomic DNA
tctagatttggagagacaagggg

SEQ ID NO: 4131 - DNA, 23 bp, Homo sapiens
  source 1..23: mol_type = genomic DNA
gtaaacaggcaaagtcacaaagg

SEQ ID NO: 4132 - DNA, 23 bp, Homo sapiens
  source 1..23: mol_type = genomic DNA
tgaagtgcctgggtactgggtgg

SEQ ID NO: 4133 - DNA, 23 bp, Homo sapiens
  source 1..23: mol_type = genomic DNA
atattaagaacagatacactcgg

SEQ ID NO: 4134 - DNA, 23 bp, Homo sapiens
  source 1..23: mol_type = genomic DNA
gtcctttagaaatttctctgagg

SEQ ID NO: 4135 - DNA, 23 bp, Homo sapiens
  source 1..23: mol_type = genomic DNA
gatactcctcattacccccacgg

SEQ ID NO: 4136 - DNA, 23 bp, Homo sapiens
  source 1..23: mol_type = genomic DNA
atcactaccactgtgctgcgagg

SEQ ID NO: 4137 - DNA, 23 bp, Homo sapiens
  source 1..23: mol_type = genomic DNA
agggtgaaggaaccgtttggggg

SEQ ID NO: 4138 - DNA, 23 bp, Homo sapiens
  source 1..23: mol_type = genomic DNA
cacagggaactggcaccacgggg

SEQ ID NO: 4139 - DNA, 23 bp, Homo sapiens
  source 1..23: mol_type = genomic DNA
atgtggcagtttaatgacagagg

SEQ ID NO: 4140 - DNA, 23 bp, Homo sapiens
  source 1..23: mol_type = genomic DNA
accaaggatgacttcccagtagg

SEQ ID NO: 4141 - DNA, 23 bp, Homo sapiens
  source 1..23: mol_type = genomic DNA
gttatagcagtgtaggctggagg

SEQ ID NO: 4142 - DNA, 23 bp, Homo sapiens
  source 1..23: mol_type = genomic DNA
tatggaatagctgagactgaggg

SEQ ID NO: 4143 - DNA, 23 bp, Homo sapiens
  source 1..23: mol_type = genomic DNA
ttatgtgtagatacacagactgg

SEQ ID NO: 4144 - DNA, 23 bp, Homo sapiens
  source 1..23: mol_type = genomic DNA
atgcccgggtacttcaagcaggg

SEQ ID NO: 4145 - DNA, 23 bp, Homo sapiens
  source 1..23: mol_type = genomic DNA
gggttcaataaattcctcagtgg

SEQ ID NO: 4146 - DNA, 23 bp, Homo sapiens
  source 1..23: mol_type = genomic DNA
tgagtgataaacatcctgcaggg

SEQ ID NO: 4147 - DNA, 23 bp, Homo sapiens
  source 1..23: mol_type = genomic DNA
tgaggtcgaagcttacggcaagg

SEQ ID NO: 4148 - DNA, 23 bp, Homo sapiens
  source 1..23: mol_type = genomic DNA
atttgctgtgataaacagtgggg

SEQ ID NO: 4149 - DNA, 23 bp, Homo sapiens
  source 1..23: mol_type = genomic DNA
aaaacttaaaaagcacctagagg

SEQ ID NO: 4150 - DNA, 23 bp, Homo sapiens
  source 1..23: mol_type = genomic DNA
tgactacaaaaggtatcaggagg

SEQ ID NO: 4151 - DNA, 23 bp, Homo sapiens
  source 1..23: mol_type = genomic DNA
taagtcacatccagaaatcgggg

SEQ ID NO: 4152 - DNA, 23 bp, Homo sapiens
  source 1..23: mol_type = genomic DNA
agacaaagagtaaattactgagg

SEQ ID NO: 4153 - DNA, 23 bp, Homo sapiens
  source 1..23: mol_type = genomic DNA
atctagatagtatttccgtgggg

SEQ ID NO: 4154 - DNA, 23 bp, Homo sapiens
  source 1..23: mol_type = genomic DNA
ctactgggaaggtatgcctgtgg

SEQ ID NO: 4155 - DNA, 23 bp, Homo sapiens
  source 1..23: mol_type = genomic DNA
agagaaggaggataactaggagg

SEQ ID NO: 4156 - DNA, 23 bp, Homo sapiens
  source 1..23: mol_type = genomic DNA
agagtcccggtagaaactggagg

SEQ ID NO: 4157 - DNA, 23 bp, Homo sapiens
  source 1..23: mol_type = genomic DNA
tggaggtaaccaaaatggagagg

SEQ ID NO: 4158 - DNA, 23 bp, Homo sapiens
  source 1..23: mol_type = genomic DNA
aagggtactagtgtaagacaggg

SEQ ID NO: 4159 - DNA, 23 bp, Homo sapiens
  source 1..23: mol_type = genomic DNA
gcattttgtgcaatgctgagggg

SEQ ID NO: 4160 - DNA, 23 bp, Homo sapiens
  source 1..23: mol_type = genomic DNA
agaaatgaacaagtatccagagg

SEQ ID NO: 4161 - DNA, 23 bp, Homo sapiens
  source 1..23: mol_type = genomic DNA
aggcaatacaagaaaccttgagg

SEQ ID NO: 4162 - DNA, 23 bp, Homo sapiens
  source 1..23: mol_type = genomic DNA
aaggactcaaacttttcgcgggg

SEQ ID NO: 4163 - DNA, 23 bp, Homo sapiens
  source 1..23: mol_type = genomic DNA
gtgagagtaattgaatgctgagg

SEQ ID NO: 4164 - DNA, 23 bp, Homo sapiens
  source 1..23: mol_type = genomic DNA
ggagctttaagagcactttgggg

SEQ ID NO: 4165 - DNA, 23 bp, Homo sapiens
  source 1..23: mol_type = genomic DNA
gtaaaaaaaaatgtcaaacaagg

SEQ ID NO: 4166 - DNA, 23 bp, Homo sapiens
  source 1..23: mol_type = genomic DNA
acagtgccaggatttgaaggcgg

SEQ ID NO: 4167 - DNA, 23 bp, Homo sapiens
  source 1..23: mol_type = genomic DNA
taaaggggataataccctgaggg

SEQ ID NO: 4168 - DNA, 23 bp, Homo sapiens
  source 1..23: mol_type = genomic DNA
ttggaatataccagtcagagtgg

SEQ ID NO: 4169 - DNA, 23 bp, Homo sapiens
  source 1..23: mol_type = genomic DNA
atatatgccaggagacacctggg

SEQ ID NO: 4170 - DNA, 23 bp, Homo sapiens
  source 1..23: mol_type = genomic DNA
aatataacttgtttactgagggg

SEQ ID NO: 4171 - DNA, 23 bp, Homo sapiens
  source 1..23: mol_type = genomic DNA
cccttatcaagtgaactgagtgg

SEQ ID NO: 4172 - DNA, 23 bp, Homo sapiens
  source 1..23: mol_type = genomic DNA
ggactaagcatccccctgagagg

SEQ ID NO: 4173 - DNA, 23 bp, Homo sapiens
  source 1..23: mol_type = genomic DNA
tcgaattgcttcagcccaagggg

SEQ ID NO: 4174 - DNA, 23 bp, Homo sapiens
  source 1..23: mol_type = genomic DNA
catgcgcatagtcatacacatgg

SEQ ID NO: 4175 - DNA, 23 bp, Homo sapiens
  source 1..23: mol_type = genomic DNA
ggacatagttttcaacagagagg

SEQ ID NO: 4176 - DNA, 23 bp, Homo sapiens
  source 1..23: mol_type = genomic DNA
agagtcagatgtcaaccgcaggg

SEQ ID NO: 4177 - DNA, 23 bp, Homo sapiens
  source 1..23: mol_type = genomic DNA
tcaagaattataaggcggggagg

SEQ ID NO: 4178 - DNA, 23 bp, Homo sapiens
  source 1..23: mol_type = genomic DNA
caggggctcataaagtagtgagg

SEQ ID NO: 4179 - DNA, 23 bp, Homo sapiens
  source 1..23: mol_type = genomic DNA
agtattgtcggatatcctcaggg

SEQ ID NO: 4180 - DNA, 23 bp, Homo sapiens
  source 1..23: mol_type = genomic DNA
aatgagacttaattacacaaagg

SEQ ID NO: 4181 - DNA, 23 bp, Homo sapiens
  source 1..23: mol_type = genomic DNA
aagaaaccagaaaaatcactggg

SEQ ID NO: 4182 - DNA, 23 bp, Homo sapiens
  source 1..23: mol_type = genomic DNA
caaaacatctcatcagaacacgg

SEQ ID NO: 4183 - DNA, 23 bp, Homo sapiens
  source 1..23: mol_type = genomic DNA
agacaacaggatgttagcagtgg

SEQ ID NO: 4184 - DNA, 23 bp, Homo sapiens
  source 1..23: mol_type = genomic DNA
catacttaagatcaagtgggagg

SEQ ID NO: 4185 - DNA, 23 bp, Homo sapiens
  source 1..23: mol_type = genomic DNA
aacttctaataagtagactgagg

SEQ ID NO: 4186 - DNA, 23 bp, Homo sapiens
  source 1..23: mol_type = genomic DNA
ggatactcactcctctgacgtgg

SEQ ID NO: 4187 - DNA, 23 bp, Homo sapiens
  source 1..23: mol_type = genomic DNA
tcgcatctttctgatacatgagg

SEQ ID NO: 4188 - DNA, 23 bp, Homo sapiens
  source 1..23: mol_type = genomic DNA
ctaactttcagaagattacgtgg

SEQ ID NO: 4189 - DNA, 23 bp, Homo sapiens
  source 1..23: mol_type = genomic DNA
atttgccagtaggatgaggaggg

SEQ ID NO: 4190 - DNA, 23 bp, Homo sapiens
  source 1..23: mol_type = genomic DNA
tgataatgatgcttgatgggggg

SEQ ID NO: 4191 - DNA, 23 bp, Homo sapiens
  source 1..23: mol_type = genomic DNA
ccccatacttaagatcaagtggg

SEQ ID NO: 4192 - DNA, 23 bp, Homo sapiens
  source 1..23: mol_type = genomic DNA
ttacagtccagttacttgagggg

SEQ ID NO: 4193 - DNA, 23 bp, Homo sapiens
  source 1..23: mol_type = genomic DNA
aggaaagccctgtaatgacctgg

SEQ ID NO: 4194 - DNA, 23 bp, Homo sapiens
  source 1..23: mol_type = genomic DNA
aacactacccatgattacacagg

SEQ ID NO: 4195 - DNA, 23 bp, Homo sapiens
  source 1..23: mol_type = genomic DNA
tatggccaattagttgaacatgg

SEQ ID NO: 4196 - DNA, 23 bp, Homo sapiens
  source 1..23: mol_type = genomic DNA
taaaagcacaagaggccccgagg

SEQ ID NO: 4197 - DNA, 23 bp, Homo sapiens
  source 1..23: mol_type = genomic DNA
gtttaaactacactataatgggg

SEQ ID NO: 4198 - DNA, 23 bp, Homo sapiens
  source 1..23: mol_type = genomic DNA
actaatctgtgtatcctacaggg

SEQ ID NO: 4199 - DNA, 23 bp, Homo sapiens
  source 1..23: mol_type = genomic DNA
attccaagtacagacaagtgtgg

SEQ ID NO: 4200 - DNA, 23 bp, Homo sapiens
  source 1..23: mol_type = genomic DNA
taaacactaagtcttacgaaagg

SEQ ID NO: 4201 - DNA, 23 bp, Homo sapiens
  source 1..23: mol_type = genomic DNA
taaactttatgtacccacccagg

SEQ ID NO: 4202 - DNA, 23 bp, Homo sapiens
  source 1..23: mol_type = genomic DNA
ttactggacttaaaagaacatgg

SEQ ID NO: 4203 - DNA, 23 bp, Homo sapiens
  source 1..23: mol_type = genomic DNA
taatcatgaaaagagtggtgagg

SEQ ID NO: 4204 - DNA, 23 bp, Homo sapiens
  source 1..23: mol_type = genomic DNA
tgtgtgtatgtgaacgaggaggg

SEQ ID NO: 4205 - DNA, 23 bp, Homo sapiens
  source 1..23: mol_type = genomic DNA
acatcaacagtaaagctagacgg

SEQ ID NO: 4206 - DNA, 23 bp, Homo sapiens
  source 1..23: mol_type = genomic DNA
gattaagagaaaaaaaacacggg

SEQ ID NO: 4207 - DNA, 23 bp, Homo sapiens
  source 1..23: mol_type = genomic DNA
ctatataatttatatcatggggg

SEQ ID NO: 4208 - DNA, 23 bp, Homo sapiens
  source 1..23: mol_type = genomic DNA
aggcacaccactagaacacgggg

SEQ ID NO: 4209 - DNA, 23 bp, Homo sapiens
  source 1..23: mol_type = genomic DNA
tttggtacgctttcaaactgggg

SEQ ID NO: 4210 - DNA, 23 bp, Homo sapiens
  source 1..23: mol_type = genomic DNA
acagaataagaaagcactagggg

SEQ ID NO: 4211 - DNA, 23 bp, Homo sapiens
  source 1..23: mol_type = genomic DNA
atttgaaacaacaagcaaggagg

SEQ ID NO: 4212 - DNA, 23 bp, Homo sapiens
  source 1..23: mol_type = genomic DNA
gtatgaaaaggacacgagagagg

SEQ ID NO: 4213 - DNA, 23 bp, Homo sapiens
  source 1..23: mol_type = genomic DNA
cagataggtaggttgacaagtgg

SEQ ID NO: 4214 - DNA, 23 bp, Homo sapiens
  source 1..23: mol_type = genomic DNA
gatcctttccatagactctgagg

SEQ ID NO: 4215 - DNA, 23 bp, Homo sapiens
  source 1..23: mol_type = genomic DNA
acattattatcacagctgcaagg

SEQ ID NO: 4216 - DNA, 23 bp, Homo sapiens
  source 1..23: mol_type = genomic DNA
attgggatactcctatgccaggg

SEQ ID NO: 4217 - DNA, 23 bp, Homo sapiens
  source 1..23: mol_type = genomic DNA
gatgcgggaaaggtggactgggg

SEQ ID NO: 4218 - DNA, 23 bp, Homo sapiens
  source 1..23: mol_type = genomic DNA
gcaaaaagcacagtgtcaagggg

SEQ ID NO: 4219 - DNA, 23 bp, Homo sapiens
  source 1..23: mol_type = genomic DNA
taagggcgtagggataggaaagg

SEQ ID NO: 4220 - DNA, 23 bp, Homo sapiens
  source 1..23: mol_type = genomic DNA
aatatgtagacatattggcaggg

SEQ ID NO: 4221 - DNA, 23 bp, Homo sapiens
  source 1..23: mol_type = genomic DNA
ttttgttttagatattagagagg

SEQ ID NO: 4222 - DNA, 23 bp, Homo sapiens
  source 1..23: mol_type = genomic DNA
ggttacatctaacctcacaaagg

SEQ ID NO: 4223 - DNA, 23 bp, Homo sapiens
  source 1..23: mol_type = genomic DNA
agaatatgtcagaattcctgggg

SEQ ID NO: 4224 - DNA, 23 bp, Homo sapiens
  source 1..23: mol_type = genomic DNA
tagcttccaagaatgagggaagg

SEQ ID NO: 4225 - DNA, 23 bp, Homo sapiens
  source 1..23: mol_type = genomic DNA
atctgaggatgtgcttgcagtgg

SEQ ID NO: 4226 - DNA, 23 bp, Homo sapiens
  source 1..23: mol_type = genomic DNA
ttggcctcaaagtaacagaaggg

SEQ ID NO: 4227 - DNA, 23 bp, Homo sapiens
  source 1..23: mol_type = genomic DNA
acgcatttctacaaaaaccgtgg

SEQ ID NO: 4228 - DNA, 23 bp, Homo sapiens
  source 1..23: mol_type = genomic DNA
tcacatgaataaagttcctgagg

SEQ ID NO: 4229 - DNA, 23 bp, Homo sapiens
  source 1..23: mol_type = genomic DNA
tgtatggtgtctatatacgtggg

SEQ ID NO: 4230 - DNA, 23 bp, Homo sapiens
  source 1..23: mol_type = genomic DNA
ataatgatttccaatcaggtagg

SEQ ID NO: 4231 - DNA, 23 bp, Homo sapiens
  source 1..23: mol_type = genomic DNA
cacctggagagtttactgaaagg

SEQ ID NO: 4232 - DNA, 23 bp, Homo sapiens
  source 1..23: mol_type = genomic DNA
atatttagcacatgactaggtgg

SEQ ID NO: 4233 - DNA, 23 bp, Homo sapiens
  source 1..23: mol_type = genomic DNA
ttcaagaaaaatgttaccagggg

SEQ ID NO: 4234 - DNA, 23 bp, Homo sapiens
  source 1..23: mol_type = genomic DNA
gcttatgttaaggaagcatgggg

SEQ ID NO: 4235 - DNA, 23 bp, Homo sapiens
  source 1..23: mol_type = genomic DNA
gctagcgagctaaaccaaagagg

SEQ ID NO: 4236 - DNA, 23 bp, Homo sapiens
  source 1..23: mol_type = genomic DNA
ggtggactggggatacaatgtgg

SEQ ID NO: 4237 - DNA, 23 bp, Homo sapiens
  source 1..23: mol_type = genomic DNA
cacaaagaattgcaaaactgggg

SEQ ID NO: 4238 - DNA, 23 bp, Homo sapiens
  source 1..23: mol_type = genomic DNA
gaaagtggagaaaagttcagagg

SEQ ID NO: 4239 - DNA, 23 bp, Homo sapiens
  source 1..23: mol_type = genomic DNA
aactttatagtaccctaccctgg

SEQ ID NO: 4240 - DNA, 23 bp, Homo sapiens
  source 1..23: mol_type = genomic DNA
gatggttttgagtactcaggagg

SEQ ID NO: 4241 - DNA, 23 bp, Homo sapiens
  source 1..23: mol_type = genomic DNA
ttaaatgtaaataatccgtgggg

SEQ ID NO: 4242 - DNA, 23 bp, Homo sapiens
  source 1..23: mol_type = genomic DNA
atggccttttggcatctgagagg

SEQ ID NO: 4243 - DNA, 23 bp, Homo sapiens
  source 1..23: mol_type = genomic DNA
gaaatggcatattaaaacagagg

SEQ ID NO: 4244 - DNA, 23 bp, Homo sapiens
  source 1..23: mol_type = genomic DNA
ccttcatatctgtaatcatgagg

SEQ ID NO: 4245 - DNA, 23 bp, Homo sapiens
  source 1..23: mol_type = genomic DNA
gaaactgtaacagttgtaagggg

SEQ ID NO: 4246 - DNA, 23 bp, Homo sapiens
  source 1..23: mol_type = genomic DNA
aagaccacaatctacctgggtgg

SEQ ID NO: 4247 - DNA, 23 bp, Homo sapiens
  source 1..23: mol_type = genomic DNA
gcagtgtatgaagattcagaagg

SEQ ID NO: 4248 - DNA, 23 bp, Homo sapiens
  source 1..23: mol_type = genomic DNA
ttattaattaaagacttacgtgg

SEQ ID NO: 4249 - DNA, 23 bp, Homo sapiens
  source 1..23: mol_type = genomic DNA
ggattgatttctcaatctcgggg

SEQ ID NO: 4250 - DNA, 23 bp, Homo sapiens
  source 1..23: mol_type = genomic DNA
gattacgtgtgagtggtgctagg

SEQ ID NO: 4251 - DNA, 23 bp, Homo sapiens
  source 1..23: mol_type = genomic DNA
gaggattctcagttaaggggagg

SEQ ID NO: 4252 - DNA, 23 bp, Homo sapiens
  source 1..23: mol_type = genomic DNA
ttacacataagcagaaggagagg

SEQ ID NO: 4253 - DNA, 23 bp, Homo sapiens
  source 1..23: mol_type = genomic DNA
attagcctgtaattttacagcgg

SEQ ID NO: 4254 - DNA, 23 bp, Homo sapiens
  source 1..23: mol_type = genomic DNA
gtaaagtggcaaatagttggggg

SEQ ID NO: 4255 - DNA, 23 bp, Homo sapiens
  source 1..23: mol_type = genomic DNA
gtttcaagaacagtatactgtgg

SEQ ID NO: 4256 - DNA, 23 bp, Homo sapiens
  source 1..23: mol_type = genomic DNA
ttggatgagtagacgaatggagg

SEQ ID NO: 4257 - DNA, 23 bp, Homo sapiens
  source 1..23: mol_type = genomic DNA
acgcggcacaataaaacccaagg

SEQ ID NO: 4258 - DNA, 23 bp, Homo sapiens
  source 1..23: mol_type = genomic DNA
aatgagcttcctcaaacacaggg

SEQ ID NO: 4259 - DNA, 23 bp, Homo sapiens
  source 1..23: mol_type = genomic DNA
aggtaactgaaaactttcagtgg

SEQ ID NO: 4260 - DNA, 23 bp, Homo sapiens
  source 1..23: mol_type = genomic DNA
attccaggaaagctgccatgtgg

SEQ ID NO: 4261 - DNA, 23 bp, Homo sapiens
  source 1..23: mol_type = genomic DNA
tcaaggacctcagagtcgagtgg

SEQ ID NO: 4262 - DNA, 23 bp, Homo sapiens
  source 1..23: mol_type = genomic DNA
acgagattctttcctctcagggg

SEQ ID NO: 4263 - DNA, 23 bp, Homo sapiens
  source 1..23: mol_type = genomic DNA
ttgggccagtgtaggccccgtgg

SEQ ID NO: 4264 - DNA, 23 bp, Homo sapiens
  source 1..23: mol_type = genomic DNA
gaatttgactgaatagaaagtgg

SEQ ID NO: 4265 - DNA, 23 bp, Homo sapiens
  source 1..23: mol_type = genomic DNA
ctttgccaatgaaatgtgtgtgg

SEQ ID NO: 4266 - DNA, 23 bp, Homo sapiens
  source 1..23: mol_type = genomic DNA
tttcgtatgaaacctcacattgg

SEQ ID NO: 4267 - DNA, 23 bp, Homo sapiens
  source 1..23: mol_type = genomic DNA
agagaggacatgatatccaaggg

SEQ ID NO: 4268 - DNA, 23 bp, Homo sapiens
  source 1..23: mol_type = genomic DNA
gtatggggagagtacaggtgtgg

SEQ ID NO: 4269 - DNA, 23 bp, Homo sapiens
  source 1..23: mol_type = genomic DNA
gggaaacactaacacaatggtgg

SEQ ID NO: 4270 - DNA, 23 bp, Homo sapiens
  source 1..23: mol_type = genomic DNA
attacagactaaataccccctgg

SEQ ID NO: 4271 - DNA, 23 bp, Homo sapiens
  source 1..23: mol_type = genomic DNA
tcaaaaaacgtagaacggaaggg

SEQ ID NO: 4272 - DNA, 23 bp, Homo sapiens
  source 1..23: mol_type = genomic DNA
ctgaacatgtgtaaagcaagggg

SEQ ID NO: 4273 - DNA, 23 bp, Homo sapiens
  source 1..23: mol_type = genomic DNA
tagttgcatttacaatacagtgg

SEQ ID NO: 4274 - DNA, 23 bp, Homo sapiens
  source 1..23: mol_type = genomic DNA
gtgtacgtgtgtgtatgcatggg

SEQ ID NO: 4275 - DNA, 23 bp, Homo sapiens
  source 1..23: mol_type = genomic DNA
gaagtattagcgaagtgacaggg

SEQ ID NO: 4276 - DNA, 23 bp, Homo sapiens
  source 1..23: mol_type = genomic DNA
acctggtgcagaggtccctgagg

SEQ ID NO: 4277 - DNA, 23 bp, Homo sapiens
  source 1..23: mol_type = genomic DNA
atgtatgcatgtgttatggtagg

SEQ ID NO: 4278 - DNA, 23 bp, Homo sapiens
  source 1..23: mol_type = genomic DNA
aatgtgctggatgaataagaggg

SEQ ID NO: 4279 - DNA, 23 bp, Homo sapiens
  source 1..23: mol_type = genomic DNA
atatagcaaatattcaacaatgg

SEQ ID NO: 4280 - DNA, 23 bp, Homo sapiens
  source 1..23: mol_type = genomic DNA
atagtatctaggctcagagacgg

SEQ ID NO: 4281 - DNA, 23 bp, Homo sapiens
  source 1..23: mol_type = genomic DNA
acacctccacacatatgggaagg

SEQ ID NO: 4282 - DNA, 23 bp, Homo sapiens
  source 1..23: mol_type = genomic DNA
tttttttctacataaaaacgtgg

SEQ ID NO: 4283 - DNA, 23 bp, Homo sapiens
  source 1..23: mol_type = genomic DNA
cattacgtttccatttgctgcgg

SEQ ID NO: 4284 - DNA, 23 bp, Homo sapiens
  source 1..23: mol_type = genomic DNA
aagtgatcaccagagacacatgg

SEQ ID NO: 4285 - DNA, 23 bp, Homo sapiens
  source 1..23: mol_type = genomic DNA
gtgtatgttgaagatgaaagggg

SEQ ID NO: 4286 - DNA, 23 bp, Homo sapiens
  source 1..23: mol_type = genomic DNA
aaaaactgtctagaaaccacagg

SEQ ID NO: 4287 - DNA, 23 bp, Homo sapiens
  source 1..23: mol_type = genomic DNA
attggaaatcaactgcatgaggg

SEQ ID NO: 4288 - DNA, 23 bp, Homo sapiens
  source 1..23: mol_type = genomic DNA
tacatccatgaagcagcaagggg

SEQ ID NO: 4289 - DNA, 23 bp, Homo sapiens
  source 1..23: mol_type = genomic DNA
gagctttaagagcactttggggg

SEQ ID NO: 4290 - DNA, 23 bp, Homo sapiens
  source 1..23: mol_type = genomic DNA
tttagactattcctacaaccagg

SEQ ID NO: 4291 - DNA, 23 bp, Homo sapiens
  source 1..23: mol_type = genomic DNA
ctactgcctatctctaccaaagg

SEQ ID NO: 4292 - DNA, 23 bp, Homo sapiens
  source 1..23: mol_type = genomic DNA
ggcctgctgtattccctgggtgg

SEQ ID NO: 4293 - DNA, 23 bp, Homo sapiens
  source 1..23: mol_type = genomic DNA
aaaaaaccacatcagaccgtggg

SEQ ID NO: 4294 - DNA, 23 bp, Homo sapiens
  source 1..23: mol_type = genomic DNA
tgaacttggtaaagaccaagagg

SEQ ID NO: 4295 - DNA, 23 bp, Homo sapiens
  source 1..23: mol_type = genomic DNA
aaaaatgattaacaaaacacagg

SEQ ID NO: 4296 - DNA, 23 bp, Homo sapiens
  source 1..23: mol_type = genomic DNA
agagaaccagaatgattttgggg

SEQ ID NO: 4297 - DNA, 23 bp, Homo sapiens
  source 1..23: mol_type = genomic DNA
acataaggatctacatgcagtgg

SEQ ID NO: 4298 - DNA, 23 bp, Homo sapiens
  source 1..23: mol_type = genomic DNA
gtaaactctccaggtgagagggg

SEQ ID NO: 4299 - DNA, 23 bp, Homo sapiens
  source 1..23: mol_type = genomic DNA
cttagcaagaagaattggagtgg

SEQ ID NO: 4300 - DNA, 23 bp, Homo sapiens
  source 1..23: mol_type = genomic DNA
agtagaaagtaaagaacacaggg

SEQ ID NO: 4301 - DNA, 23 bp, Homo sapiens
  source 1..23: mol_type = genomic DNA
gacaaaaccccagagaaaggggg

SEQ ID NO: 4302 - DNA, 23 bp, Homo sapiens
  source 1..23: mol_type = genomic DNA
aaataggtagtgccttacaaagg

SEQ ID NO: 4303 - DNA, 23 bp, Homo sapiens
  source 1..23: mol_type = genomic DNA
aaatcaaagataacaccacaggg

SEQ ID NO: 4304 - DNA, 23 bp, Homo sapiens
  source 1..23: mol_type = genomic DNA
tcctcactatttctgaaacgagg

SEQ ID NO: 4305 - DNA, 23 bp, Homo sapiens
  source 1..23: mol_type = genomic DNA
aagattcagctacatctggtggg

SEQ ID NO: 4306 - DNA, 23 bp, Homo sapiens
  source 1..23: mol_type = genomic DNA
tggatcaccaggtcattacaggg

SEQ ID NO: 4307 - DNA, 23 bp, Homo sapiens
  source 1..23: mol_type = genomic DNA
aaggcttacacataagcagaagg

SEQ ID NO: 4308 - DNA, 23 bp, Homo sapiens
  source 1..23: mol_type = genomic DNA
tgagtgacagttaagtggcaggg

SEQ ID NO: 4309 - DNA, 23 bp, Homo sapiens
  source 1..23: mol_type = genomic DNA
tgacaggcatgatagaagcaggg

SEQ ID NO: 4310 - DNA, 23 bp, Homo sapiens
  source 1..23: mol_type = genomic DNA
gaacagcctgcatattgccacgg

SEQ ID NO: 4311 - DNA, 23 bp, Homo sapiens
  source 1..23: mol_type = genomic DNA
tctttcaattaaatatcgggagg

SEQ ID NO: 4312 - DNA, 23 bp, Homo sapiens
  source 1..23: mol_type = genomic DNA
acattcatctcaattgagcaagg

SEQ ID NO: 4313 - DNA, 23 bp, Homo sapiens
  source 1..23: mol_type = genomic DNA
gataaacagcatttatactgtgg

SEQ ID NO: 4314 - DNA, 23 bp, Homo sapiens
  source 1..23: mol_type = genomic DNA
aaagcactagggggcaactgtgg

SEQ ID NO: 4315 - DNA, 23 bp, Homo sapiens
  source 1..23: mol_type = genomic DNA
tacatggcatccagagaacaggg

SEQ ID NO: 4316 - DNA, 23 bp, Homo sapiens
  source 1..23: mol_type = genomic DNA
gacagcctctacaagtagcaggg

SEQ ID NO: 4317 - DNA, 23 bp, Homo sapiens
  source 1..23: mol_type = genomic DNA
tcaggaggtcaatgtaaaggagg

SEQ ID NO: 4318 - DNA, 23 bp, Homo sapiens
  source 1..23: mol_type = genomic DNA
aactctatccaggagacatgggg

SEQ ID NO: 4319 - DNA, 23 bp, Homo sapiens
  source 1..23: mol_type = genomic DNA
aaggaaaatgacagaaatagcgg

SEQ ID NO: 4320 - DNA, 23 bp, Homo sapiens
  source 1..23: mol_type = genomic DNA
aatttgtgtgtgatgtgtggtgg

SEQ ID NO: 4321 - DNA, 23 bp, Homo sapiens
  source 1..23: mol_type = genomic DNA
tcaatcccctcatatacagaggg

SEQ ID NO: 4322 - DNA, 23 bp, Homo sapiens
  source 1..23: mol_type = genomic DNA
tgagcaaagcaggaaagggtcgg

SEQ ID NO: 4323 - DNA, 23 bp, Homo sapiens
  source 1..23: mol_type = genomic DNA
catgtgcctagcacaaatagagg

SEQ ID NO: 4324 - DNA, 23 bp, Homo sapiens
  source 1..23: mol_type = genomic DNA
ttgactatcatcacattcagggg

SEQ ID NO: 4325 - DNA, 23 bp, Homo sapiens
  source 1..23: mol_type = genomic DNA
ccttagcagataaaatcagtagg

SEQ ID NO: 4326 - DNA, 23 bp, Homo sapiens
  source 1..23: mol_type = genomic DNA
gttgtgctcatagggcacaatgg

SEQ ID NO: 4327 - DNA, 23 bp, Homo sapiens
  source 1..23: mol_type = genomic DNA
cttctcttgtagatcaccagtgg

SEQ ID NO: 4328 - DNA, 23 bp, Homo sapiens
  source 1..23: mol_type = genomic DNA
ggtgataacatttaacaggaggg

SEQ ID NO: 4329 - DNA, 23 bp, Homo sapiens
  source 1..23: mol_type = genomic DNA
gctaatatatataattaaggagg

SEQ ID NO: 4330 - DNA, 23 bp, Homo sapiens
  source 1..23: mol_type = genomic DNA
gtaatgttgccagtactggaagg

SEQ ID NO: 4331 - DNA, 23 bp, Homo sapiens
  source 1..23: mol_type = genomic DNA
tttactatcccaaagttgggggg

SEQ ID NO: 4332 - DNA, 23 bp, Homo sapiens
  source 1..23: mol_type = genomic DNA
gttcttgctatcattaagagggg

SEQ ID NO: 4333 - DNA, 23 bp, Homo sapiens
  source 1..23: mol_type = genomic DNA
aaagacaggatatataagcaggg

SEQ ID NO: 4334 - DNA, 23 bp, Homo sapiens
  source 1..23: mol_type = genomic DNA
tgactctagatgattataggtgg

SEQ ID NO: 4335 - DNA, 23 bp, Homo sapiens
  source 1..23: mol_type = genomic DNA
tgaatgtgttcaaaaaaaccagg

SEQ ID NO: 4336 - DNA, 23 bp, Homo sapiens
  source 1..23: mol_type = genomic DNA
taggtaaattaaataatgggagg

SEQ ID NO: 4337 - DNA, 23 bp, Homo sapiens
  source 1..23: mol_type = genomic DNA
tacacataagcagaaggagaggg

SEQ ID NO: 4338 - DNA, 23 bp, Homo sapiens
  source 1..23: mol_type = genomic DNA
taaagtttaaatgtacctagagg

SEQ ID NO: 4339 - DNA, 23 bp, Homo sapiens
  source 1..23: mol_type = genomic DNA
gagtgtctccagtgccagagagg

SEQ ID NO: 4340 - DNA, 23 bp, Homo sapiens
  source 1..23: mol_type = genomic DNA
gttgtcccagtagaatcagtagg

SEQ ID NO: 4341 - DNA, 23 bp, Homo sapiens
  source 1..23: mol_type = genomic DNA
caaaagaccacaatctacctggg

SEQ ID NO: 4342 - DNA, 23 bp, Homo sapiens
  source 1..23: mol_type = genomic DNA
agataaatatcggaatctgtggg

SEQ ID NO: 4343 - DNA, 23 bp, Homo sapiens
  source 1..23: mol_type = genomic DNA
atttgcagtagaggaaacaaagg

SEQ ID NO: 4344 - DNA, 23 bp, Homo sapiens
  source 1..23: mol_type = genomic DNA
aggaacttaaagttcccactagg

SEQ ID NO: 4345 - DNA, 23 bp, Homo sapiens
  source 1..23: mol_type = genomic DNA
aatgatggtgaaactggcggtgg

SEQ ID NO: 4346 - DNA, 23 bp, Homo sapiens
  source 1..23: mol_type = genomic DNA
ttccctctaacaaacagccatgg

SEQ ID NO: 4347 - DNA, 23 bp, Homo sapiens
  source 1..23: mol_type = genomic DNA
catatacatttccccaaccaggg

SEQ ID NO: 4348 - DNA, 23 bp, Homo sapiens
  source 1..23: mol_type = genomic DNA
acctgccctctgtatatgagggg

SEQ ID NO: 4349 - DNA, 23 bp, Homo sapiens
  source 1..23: mol_type = genomic DNA
tatagttccagcagaaagcgagg

SEQ ID NO: 4350 - DNA, 23 bp, Homo sapiens
  source 1..23: mol_type = genomic DNA
gtttactatcccaaagttggggg

SEQ ID NO: 4351 - DNA, 23 bp, Homo sapiens
  source 1..23: mol_type = genomic DNA
ttaggcttcagatctagtagagg

SEQ ID NO: 4352 - DNA, 23 bp, Homo sapiens
  source 1..23: mol_type = genomic DNA
agtatgttagattttacctgggg

SEQ ID NO: 4353 - DNA, 23 bp, Homo sapiens
  source 1..23: mol_type = genomic DNA
atggtatcacctactgtcagagg

SEQ ID NO: 4354 - DNA, 23 bp, Homo sapiens
  source 1..23: mol_type = genomic DNA
caaaaggtaagagaataggatgg

SEQ ID NO: 4355 - DNA, 23 bp, Homo sapiens
  source 1..23: mol_type = genomic DNA
gctttcatacaataccctgaagg

SEQ ID NO: 4356 - DNA, 23 bp, Homo sapiens
  source 1..23: mol_type = genomic DNA
gacacaattataaaaccaagagg

SEQ ID NO: 4357 - DNA, 23 bp, Homo sapiens
  source 1..23: mol_type = genomic DNA
atgttggaatctacagaccatgg

SEQ ID NO: 4358 - DNA, 23 bp, Homo sapiens
  source 1..23: mol_type = genomic DNA
agtattaccggttgtctaagggg

SEQ ID NO: 4359 - DNA, 23 bp, Homo sapiens
  source 1..23: mol_type = genomic DNA
attccaatacgattgctccaagg

SEQ ID NO: 4360 - DNA, 23 bp, Homo sapiens
  source 1..23: mol_type = genomic DNA
agatttacctgatggtgaggtgg

SEQ ID NO: 4361 - DNA, 23 bp, Homo sapiens
  source 1..23: mol_type = genomic DNA
ggatgaaagaggagacaaagggg

SEQ ID NO: 4362 - DNA, 23 bp, Homo sapiens
  source 1..23: mol_type = genomic DNA
cagtgtatgaagattcagaaggg

SEQ ID NO: 4363 - DNA, 23 bp, Homo sapiens
  source 1..23: mol_type = genomic DNA
tatccattaacagctaaggaagg

SEQ ID NO: 4364 - DNA, 23 bp, Homo sapiens
  source 1..23: mol_type = genomic DNA
gaagccaagatgaggtaaagggg

SEQ ID NO: 4365 - DNA, 23 bp, Homo sapiens
  source 1..23: mol_type = genomic DNA
aaattctgtctaatttcacatgg

SEQ ID NO: 4366 - DNA, 23 bp, Homo sapiens
  source 1..23: mol_type = genomic DNA
gtaggacagtcaaagagtggagg

SEQ ID NO: 4367 - DNA, 23 bp, Homo sapiens
  source 1..23: mol_type = genomic DNA
catatagcatccaagacacaagg

SEQ ID NO: 4368 - DNA, 23 bp, Homo sapiens
  source 1..23: mol_type = genomic DNA
atagatgaaaagctctcacaggg

SEQ ID NO: 4369 - DNA, 23 bp, Homo sapiens
  source 1..23: mol_type = genomic DNA
ttataagctataatttccagtgg

SEQ ID NO: 4370 - DNA, 23 bp, Homo sapiens
  source 1..23: mol_type = genomic DNA
gtagtgaagttgcttatctgagg

SEQ ID NO: 4371 - DNA, 23 bp, Homo sapiens
  source 1..23: mol_type = genomic DNA
tcaataaaaccacaaacaccagg

SEQ ID NO: 4372 - DNA, 23 bp, Homo sapiens
  source 1..23: mol_type = genomic DNA
aaaggaatggcaaggcacatggg

SEQ ID NO: 4373 - DNA, 23 bp, Homo sapiens
  source 1..23: mol_type = genomic DNA
ttatgaaaagaaaaaatccaggg

SEQ ID NO: 4374 - DNA, 23 bp, Homo sapiens
  source 1..23: mol_type = genomic DNA
acttgatcttaagtatggggagg

SEQ ID NO: 4375 - DNA, 23 bp, Homo sapiens
  source 1..23: mol_type = genomic DNA
tgttatggctaggataacttggg

SEQ ID NO: 4376 - DNA, 23 bp, Homo sapiens
  source 1..23: mol_type = genomic DNA
tattactgcagtacaagccaggg

SEQ ID NO: 4377 - DNA, 23 bp, Homo sapiens
  source 1..23: mol_type = genomic DNA
aatctatagtgagatatgaaggg

SEQ ID NO: 4378 - DNA, 23 bp, Homo sapiens
  source 1..23: mol_type = genomic DNA
ttaattctcatggtcatgcgggg

SEQ ID NO: 4379 - DNA, 23 bp, Homo sapiens
  source 1..23: mol_type = genomic DNA
gtgaacatccacatgtacctggg

SEQ ID NO: 4380 - DNA, 23 bp, Homo sapiens
  source 1..23: mol_type = genomic DNA
agattacctttctggtagggagg

SEQ ID NO: 4381 - DNA, 23 bp, Homo sapiens
  source 1..23: mol_type = genomic DNA
ataaaagtttacaaagacagagg

SEQ ID NO: 4382 - DNA, 23 bp, Homo sapiens
  source 1..23: mol_type = genomic DNA
ttaattaaagacttacgtggagg

SEQ ID NO: 4383 - DNA, 23 bp, Homo sapiens
  source 1..23: mol_type = genomic DNA
ggcagagcctccattccagaggg

SEQ ID NO: 4384 - DNA, 23 bp, Homo sapiens
  source 1..23: mol_type = genomic DNA
ataccagagtaagtacagctagg

SEQ ID NO: 4385 - DNA, 23 bp, Homo sapiens
  source 1..23: mol_type = genomic DNA
agtattctgccaaaataaagggg

SEQ ID NO: 4386 - DNA, 23 bp, Homo sapiens
  source 1..23: mol_type = genomic DNA
gctgccaacaccacagttggggg

SEQ ID NO: 4387 - DNA, 23 bp, Homo sapiens
  source 1..23: mol_type = genomic DNA
acatttactaggcgttaacaagg

SEQ ID NO: 4388 - DNA, 23 bp, Homo sapiens
  source 1..23: mol_type = genomic DNA
tgctcccatgcatacccccgtgg

SEQ ID NO: 4389 - DNA, 23 bp, Homo sapiens
  source 1..23: mol_type = genomic DNA
ctcaggctttggaaacagggggg

SEQ ID NO: 4390 - DNA, 23 bp, Homo sapiens
  source 1..23: mol_type = genomic DNA
gttactttgaagccaagatgagg

SEQ ID NO: 4391 - DNA, 23 bp, Homo sapiens
  source 1..23: mol_type = genomic DNA
aagaaagtttgtgaaccactggg

SEQ ID NO: 4392 - DNA, 23 bp, Homo sapiens
  source 1..23: mol_type = genomic DNA
aatattgtcaaaaatccacctgg

SEQ ID NO: 4393 - DNA, 23 bp, Homo sapiens
  source 1..23: mol_type = genomic DNA
acttctagtattcagaagagagg

SEQ ID NO: 4394 - DNA, 23 bp, Homo sapiens
  source 1..23: mol_type = genomic DNA
taaagtatagaagatgtccaagg

SEQ ID NO: 4395 - DNA, 23 bp, Homo sapiens
  source 1..23: mol_type = genomic DNA
tacaacctactgattctactggg

SEQ ID NO: 4396 - DNA, 23 bp, Homo sapiens
  source 1..23: mol_type = genomic DNA
cctgtgctaagaggcagccaggg

SEQ ID NO: 4397 - DNA, 23 bp, Homo sapiens
  source 1..23: mol_type = genomic DNA
tgtcatgtacagtgctaggttgg

SEQ ID NO: 4398 - DNA, 23 bp, Homo sapiens
  source 1..23: mol_type = genomic DNA
ttgctaggcttggctttcagcgg

SEQ ID NO: 4399 - DNA, 23 bp, Homo sapiens
  source 1..23: mol_type = genomic DNA
aggatgatactgggacaaagtgg

SEQ ID NO: 4400 - DNA, 23 bp, Homo sapiens
  source 1..23: mol_type = genomic DNA
gtgggagtgcaagtcaatagggg

SEQ ID NO: 4401 - DNA, 23 bp, Homo sapiens
  source 1..23: mol_type = genomic DNA
ggtggtagagactaggctgaagg

SEQ ID NO: 4402 - DNA, 23 bp, Homo sapiens
  source 1..23: mol_type = genomic DNA
tgaagaattatattgttgtgggg

SEQ ID NO: 4403 - DNA, 23 bp, Homo sapiens
  source 1..23: mol_type = genomic DNA
aagggaactaaaagaatcggagg

SEQ ID NO: 4404 - DNA, 23 bp, Homo sapiens
  source 1..23: mol_type = genomic DNA
catcatcctgcatcatgtgtggg

SEQ ID NO: 4405 - DNA, 23 bp, Homo sapiens
  source 1..23: mol_type = genomic DNA
gagtgcaagtcaataggggaagg

SEQ ID NO: 4406 - DNA, 23 bp, Homo sapiens
  source 1..23: mol_type = genomic DNA
ctatatagtatgtcctaccacgg

SEQ ID NO: 4407 - DNA, 23 bp, Homo sapiens
  source 1..23: mol_type = genomic DNA
aagtaataagacatttcctaggg

SEQ ID NO: 4408 - DNA, 23 bp, Homo sapiens
  source 1..23: mol_type = genomic DNA
actaaagaacatgtaacagtggg

SEQ ID NO: 4409 - DNA, 23 bp, Homo sapiens
  source 1..23: mol_type = genomic DNA
ctaattggccatagttactgagg

SEQ ID NO: 4410 - DNA, 23 bp, Homo sapiens
  source 1..23: mol_type = genomic DNA
aagggaagaagacattgtgtcgg

SEQ ID NO: 4411 - DNA, 23 bp, Homo sapiens
  source 1..23: mol_type = genomic DNA
atattgatacaggaaacttacgg

SEQ ID NO: 4412 - DNA, 23 bp, Homo sapiens
  source 1..23: mol_type = genomic DNA
aaacatatctccctacagaaggg

SEQ ID NO: 4413 - DNA, 23 bp, Homo sapiens
  source 1..23: mol_type = genomic DNA
tttactgaaaggcatacctaggg

SEQ ID NO: 4414 - DNA, 23 bp, Homo sapiens
  source 1..23: mol_type = genomic DNA
gaacattttctaattgagggtgg

SEQ ID NO: 4415 - DNA, 23 bp, Homo sapiens
  source 1..23: mol_type = genomic DNA
aacaagagtgtgttcctgagagg

SEQ ID NO: 4416 - DNA, 23 bp, Homo sapiens
  source 1..23: mol_type = genomic DNA
tcaaagaagaccatagcactagg

SEQ ID NO: 4417 - DNA, 23 bp, Homo sapiens
  source 1..23: mol_type = genomic DNA
gtaaagcaaggggtcagttgcgg

SEQ ID NO: 4418 - DNA, 23 bp, Homo sapiens
  source 1..23: mol_type = genomic DNA
gttatatcatttgacatcggggg

SEQ ID NO: 4419 - DNA, 23 bp, Homo sapiens
  source 1..23: mol_type = genomic DNA
atcacctactgttaagacacagg

SEQ ID NO: 4420 - DNA, 23 bp, Homo sapiens
  source 1..23: mol_type = genomic DNA
ttcagaaaggagaaacccatggg

SEQ ID NO: 4421 - DNA, 23 bp, Homo sapiens
  source 1..23: mol_type = genomic DNA
gagttaagattcggggacagtgg

SEQ ID NO: 4422 - DNA, 23 bp, Homo sapiens
  source 1..23: mol_type = genomic DNA
tgagcatctacactgtgtcatgg

SEQ ID NO: 4423 - DNA, 23 bp, Homo sapiens
  source 1..23: mol_type = genomic DNA
gaactgggcggactgctacaggg

SEQ ID NO: 4424 - DNA, 23 bp, Homo sapiens
  source 1..23: mol_type = genomic DNA
agtatatttctgaggactggggg

SEQ ID NO: 4425 - DNA, 23 bp, Homo sapiens
  source 1..23: mol_type = genomic DNA
ttaatgttttcattgaacgcagg

SEQ ID NO: 4426 - DNA, 23 bp, Homo sapiens
  source 1..23: mol_type = genomic DNA
ttcataaaatgggaacaaagtgg

SEQ ID NO: 4427 - DNA, 23 bp, Homo sapiens
  source 1..23: mol_type = genomic DNA
tctcaatctcggggtatgtgagg

SEQ ID NO: 4428 - DNA, 23 bp, Homo sapiens
  source 1..23: mol_type = genomic DNA
gcctaattctacagtaactgggg

SEQ ID NO: 4429 - DNA, 23 bp, Homo sapiens
  source 1..23: mol_type = genomic DNA
catcttctttagaaccaagtcgg

SEQ ID NO: 4430 - DNA, 23 bp, Homo sapiens
  source 1..23: mol_type = genomic DNA
tccagcatatcctccatgcaggg

SEQ ID NO: 4431 - DNA, 23 bp, Homo sapiens
  source 1..23: mol_type = genomic DNA
gcatcagaataattgctagaggg

SEQ ID NO: 4432 - DNA, 23 bp, Homo sapiens
  source 1..23: mol_type = genomic DNA
tctggccttaagttcaaaagggg

SEQ ID NO: 4433 - DNA, 23 bp, Homo sapiens
  source 1..23: mol_type = genomic DNA
gaaaatcaagaattataaggcgg

SEQ ID NO: 4434 - DNA, 23 bp, Homo sapiens
  source 1..23: mol_type = genomic DNA
attgcattggaggaactgcatgg

SEQ ID NO: 4435 - DNA, 23 bp, Homo sapiens
  source 1..23: mol_type = genomic DNA
tattgacttgcactcccacaggg

SEQ ID NO: 4436 - DNA, 23 bp, Homo sapiens
  source 1..23: mol_type = genomic DNA
atgctggcatgaggagagtgagg

SEQ ID NO: 4437 - DNA, 23 bp, Homo sapiens
  source 1..23: mol_type = genomic DNA
ctaatcaaatacaagaaacaggg

SEQ ID NO: 4438 - DNA, 23 bp, Homo sapiens
  source 1..23: mol_type = genomic DNA
tggatgctatatgatcctgatgg

SEQ ID NO: 4439 - DNA, 23 bp, Homo sapiens
  source 1..23: mol_type = genomic DNA
acacaatggtggcatgatagggg

SEQ ID NO: 4440 - DNA, 23 bp, Homo sapiens
  source 1..23: mol_type = genomic DNA
gctatcacatttcccaccatagg

SEQ ID NO: 4441 - DNA, 23 bp, Homo sapiens
  source 1..23: mol_type = genomic DNA
gccttcatttctgtgtcacgtgg

SEQ ID NO: 4442 - DNA, 23 bp, Homo sapiens
  source 1..23: mol_type = genomic DNA
agccaaggagatcaatgccaggg

SEQ ID NO: 4443 - DNA, 23 bp, Homo sapiens
  source 1..23: mol_type = genomic DNA
aaccttctagtcaaactccaggg

SEQ ID NO: 4444 - DNA, 23 bp, Homo sapiens
  source 1..23: mol_type = genomic DNA
agaactgctttgtcccccaaagg

SEQ ID NO: 4445 - DNA, 23 bp, Homo sapiens
  source 1..23: mol_type = genomic DNA
gtcaccctactatttcctagtgg

SEQ ID NO: 4446 - DNA, 23 bp, Homo sapiens
  source 1..23: mol_type = genomic DNA
aggtgataacatttaacaggagg

SEQ ID NO: 4447 - DNA, 23 bp, Homo sapiens
  source 1..23: mol_type = genomic DNA
atgtcctgtaaatgttcgagtgg

SEQ ID NO: 4448 - DNA, 23 bp, Homo sapiens
  source 1..23: mol_type = genomic DNA
aaatccacccaccccactagggg

SEQ ID NO: 4449 - DNA, 23 bp, Homo sapiens
  source 1..23: mol_type = genomic DNA
tcaaggttgataagggtcaaggg

SEQ ID NO: 4450 - DNA, 23 bp, Homo sapiens
  source 1..23: mol_type = genomic DNA
caatcagtcagattaaagagagg

SEQ ID NO: 4451 - DNA, 23 bp, Homo sapiens
  source 1..23: mol_type = genomic DNA
cctggggtattcatactacaggg

SEQ ID NO: 4452 - DNA, 23 bp, Homo sapiens
  source 1..23: mol_type = genomic DNA
gtatacaccaatacttatgaggg

SEQ ID NO: 4453 - DNA, 23 bp, Homo sapiens
  source 1..23: mol_type = genomic DNA
gcaaacaataagaagcagatggg

SEQ ID NO: 4454 - DNA, 23 bp, Homo sapiens
  source 1..23: mol_type = genomic DNA
agatctacatcagcagccaaagg

SEQ ID NO: 4455 - DNA, 23 bp, Homo sapiens
  source 1..23: mol_type = genomic DNA
gacataatgtctgatggcatagg

SEQ ID NO: 4456 - DNA, 23 bp, Homo sapiens
  source 1..23: mol_type = genomic DNA
ctgagcacactggagtcctgagg

SEQ ID NO: 4457 - DNA, 23 bp, Homo sapiens
  source 1..23: mol_type = genomic DNA
aggatcccagccttcttccgtgg

SEQ ID NO: 4458 - DNA, 23 bp, Homo sapiens
  source 1..23: mol_type = genomic DNA
tcactcaataccatggtaggagg

SEQ ID NO: 4459 - DNA, 23 bp, Homo sapiens
  source 1..23: mol_type = genomic DNA
cttggcatttcgggaaacagcgg

SEQ ID NO: 4460 - DNA, 23 bp, Homo sapiens
  source 1..23: mol_type = genomic DNA
gcaaatttcaggtctctgagggg

SEQ ID NO: 4461 - DNA, 23 bp, Homo sapiens
  source 1..23: mol_type = genomic DNA
ctcatgattacagatatgaaggg

SEQ ID NO: 4462 - DNA, 23 bp, Homo sapiens
  source 1..23: mol_type = genomic DNA
attccactaaacataacgatggg

SEQ ID NO: 4463 - DNA, 23 bp, Homo sapiens
  source 1..23: mol_type = genomic DNA
tattttgtaaagctacggaaggg

SEQ ID NO: 4464 - DNA, 23 bp, Homo sapiens
  source 1..23: mol_type = genomic DNA
ttataggggatatttaaaggtgg

SEQ ID NO: 4465 - DNA, 23 bp, Homo sapiens
  source 1..23: mol_type = genomic DNA
ttaacctcatcctcataatgggg

SEQ ID NO: 4466 - DNA, 23 bp, Homo sapiens
  source 1..23: mol_type = genomic DNA
agatgccccccctttctctgggg

SEQ ID NO: 4467 - DNA, 23 bp, Homo sapiens
  source 1..23: mol_type = genomic DNA
aaaaaaaccacatcagaccgtgg

SEQ ID NO: 4468 - DNA, 23 bp, Homo sapiens
  source 1..23: mol_type = genomic DNA
aacctgctgcagaacaccctagg

SEQ ID NO: 4469 - DNA, 23 bp, Homo sapiens
  source 1..23: mol_type = genomic DNA
aggcagtaatctgagctagaggg

SEQ ID NO: 4470 - DNA, 23 bp, Homo sapiens
  source 1..23: mol_type = genomic DNA
gattaacttttggatattggggg

SEQ ID NO: 4471 - DNA, 23 bp, Homo sapiens
  source 1..23: mol_type = genomic DNA
tttgcctaagcagctttgggtgg

SEQ ID NO: 4472 - DNA, 23 bp, Homo sapiens
  source 1..23: mol_type = genomic DNA
gcactcccgtaggtactgaaagg

SEQ ID NO: 4473 - DNA, 23 bp, Homo sapiens
  source 1..23: mol_type = genomic DNA
caaaaccccagagaaaggggggg

SEQ ID NO: 4474 - DNA, 23 bp, Homo sapiens
  source 1..23: mol_type = genomic DNA
tggcatatctagcctatggtggg

SEQ ID NO: 4475 - DNA, 23 bp, Homo sapiens
  source 1..23: mol_type = genomic DNA
atctctaatcatgaaaagagtgg

SEQ ID NO: 4476 - DNA, 23 bp, Homo sapiens
  source 1..23: mol_type = genomic DNA
tctgcaacatgctgaatccacgg

SEQ ID NO: 4477 - DNA, 23 bp, Homo sapiens
  source 1..23: mol_type = genomic DNA
aataaatgattacgtgtgagtgg

SEQ ID NO: 4478 - DNA, 23 bp, Homo sapiens
  source 1..23: mol_type = genomic DNA
gtatgactaagagtgtggattgg

SEQ ID NO: 4479 - DNA, 23 bp, Homo sapiens
  source 1..23: mol_type = genomic DNA
gggcaaatttcaattttatgcgg

SEQ ID NO: 4480 - DNA, 23 bp, Homo sapiens
  source 1..23: mol_type = genomic DNA
aaaagcacaagaggccccgaggg

SEQ ID NO: 4481 - DNA, 23 bp, Homo sapiens
  source 1..23: mol_type = genomic DNA
ctataaagctataaaatgagtgg

SEQ ID NO: 4482 - DNA, 23 bp, Homo sapiens
  source 1..23: mol_type = genomic DNA
tcacgtccagaggcacacactgg

SEQ ID NO: 4483 - DNA, 23 bp, Homo sapiens
  source 1..23: mol_type = genomic DNA
aagttggaagaaatattggaagg

SEQ ID NO: 4484 - DNA, 23 bp, Homo sapiens
  source 1..23: mol_type = genomic DNA
cttcaaccttcccatatgtgtgg

SEQ ID NO: 4485 - DNA, 23 bp, Homo sapiens
  source 1..23: mol_type = genomic DNA
tcaggagtagtagtaactcatgg

SEQ ID NO: 4486 - DNA, 23 bp, Homo sapiens
  source 1..23: mol_type = genomic DNA
acattacaaactctgatgagtgg

SEQ ID NO: 4487 - DNA, 23 bp, Homo sapiens
  source 1..23: mol_type = genomic DNA
catccagtgtaaaggtgcagagg

SEQ ID NO: 4488 - DNA, 23 bp, Homo sapiens
  source 1..23: mol_type = genomic DNA
atcaccagtgggcattcctgagg

SEQ ID NO: 4489 - DNA, 23 bp, Homo sapiens
  source 1..23: mol_type = genomic DNA
aatctgtatgactaagagtgtgg

SEQ ID NO: 4490 - DNA, 23 bp, Homo sapiens
  source 1..23: mol_type = genomic DNA
gatgccaaaaggccatgactggg

SEQ ID NO: 4491 - DNA, 23 bp, Homo sapiens
  source 1..23: mol_type = genomic DNA
ccttgcttacacgatcattgtgg

SEQ ID NO: 4492 - DNA, 23 bp, Homo sapiens
  source 1..23: mol_type = genomic DNA
ctcttaatcccatcataaagggg

SEQ ID NO: 4493 - DNA, 23 bp, Homo sapiens
  source 1..23: mol_type = genomic DNA
cagaaggaccggagacaggtagg

SEQ ID NO: 4494 - DNA, 23 bp, Homo sapiens
  source 1..23: mol_type = genomic DNA
aatccccaactacaatgcgttgg

SEQ ID NO: 4495 - DNA, 23 bp, Homo sapiens
  source 1..23: mol_type = genomic DNA
gaataaaactgagcaccgaaagg

SEQ ID NO: 4496 - DNA, 23 bp, Homo sapiens
  source 1..23: mol_type = genomic DNA
tctccagtgccagagagggaggg

SEQ ID NO: 4497 - DNA, 23 bp, Homo sapiens
  source 1..23: mol_type = genomic DNA
tatgcacatattatatagtgagg

SEQ ID NO: 4498 - DNA, 23 bp, Homo sapiens
  source 1..23: mol_type = genomic DNA
gtcaagatctcagtaacactggg

SEQ ID NO: 4499 - DNA, 23 bp, Homo sapiens
  source 1..23: mol_type = genomic DNA
gggtgttaagaaaacatgacagg

SEQ ID NO: 4500 - DNA, 23 bp, Homo sapiens
  source 1..23: mol_type = genomic DNA
gaaacggtatggtacaaggttgg

SEQ ID NO: 4501 - DNA, 23 bp, Homo sapiens
  source 1..23: mol_type = genomic DNA
acagaagtgtcaaagttgagagg

SEQ ID NO: 4502 - DNA, 23 bp, Homo sapiens
  source 1..23: mol_type = genomic DNA
tgaccgtacagagatatgaaagg

SEQ ID NO: 4503 - DNA, 23 bp, Homo sapiens
  source 1..23: mol_type = genomic DNA
tgtgacttcatgataaaaagggg

SEQ ID NO: 4504 - DNA, 23 bp, Homo sapiens
  source 1..23: mol_type = genomic DNA
aattttgtccaattcgcaggtgg

SEQ ID NO: 4505 - DNA, 23 bp, Homo sapiens
  source 1..23: mol_type = genomic DNA
tggagccaaaacaatccactagg

SEQ ID NO: 4506 - DNA, 23 bp, Homo sapiens
  source 1..23: mol_type = genomic DNA
caaatgacgccacaacaacaagg

SEQ ID NO: 4507 - DNA, 23 bp, Homo sapiens
  source 1..23: mol_type = genomic DNA
tttacccataacgtaaaggaagg

SEQ ID NO: 4508 - DNA, 23 bp, Homo sapiens
  source 1..23: mol_type = genomic DNA
tagatattaaggcctgtgggggg

SEQ ID NO: 4509 - DNA, 23 bp, Homo sapiens
  source 1..23: mol_type = genomic DNA
taaattactgaggaggaagacgg

SEQ ID NO: 4510 - DNA, 23 bp, Homo sapiens
  source 1..23: mol_type = genomic DNA
aagctcagtctactttatcaggg

SEQ ID NO: 4511 - DNA, 23 bp, Homo sapiens
  source 1..23: mol_type = genomic DNA
tggtatagcaattttccaggtgg

SEQ ID NO: 4512 - DNA, 23 bp, Homo sapiens
  source 1..23: mol_type = genomic DNA
ttaacttccataatcaaaggagg

SEQ ID NO: 4513 - DNA, 23 bp, Homo sapiens
  source 1..23: mol_type = genomic DNA
ttgtatggtagttacaacattgg

SEQ ID NO: 4514 - DNA, 23 bp, Homo sapiens
  source 1..23: mol_type = genomic DNA
tcagtgactctagctgagaaggg

SEQ ID NO: 4515 - DNA, 23 bp, Homo sapiens
  source 1..23: mol_type = genomic DNA
aaatcaagaattataaggcgggg

SEQ ID NO: 4516 - DNA, 23 bp, Homo sapiens
  source 1..23: mol_type = genomic DNA
gagacacactattaaatgagtgg

SEQ ID NO: 4517 - DNA, 23 bp, Homo sapiens
  source 1..23: mol_type = genomic DNA
ataagtattggtgtatacagtgg

SEQ ID NO: 4518 - DNA, 23 bp, Homo sapiens
  source 1..23: mol_type = genomic DNA
atgaaacattcagtagcagtggg

SEQ ID NO: 4519 - DNA, 23 bp, Homo sapiens
  source 1..23: mol_type = genomic DNA
tttcttgtaatgcacatggaggg

SEQ ID NO: 4520 - DNA, 23 bp, Homo sapiens
  source 1..23: mol_type = genomic DNA
tcaccctactatttcctagtggg

SEQ ID NO: 4521 - DNA, 23 bp, Homo sapiens
  source 1..23: mol_type = genomic DNA
accacagtcactgaagccctggg

SEQ ID NO: 4522 - DNA, 23 bp, Homo sapiens
  source 1..23: mol_type = genomic DNA
aggattttggttataccaagtgg

SEQ ID NO: 4523 - DNA, 23 bp, Homo sapiens
  source 1..23: mol_type = genomic DNA
aacaaatcctaatgaacccaggg

SEQ ID NO: 4524 - DNA, 23 bp, Homo sapiens
  source 1..23: mol_type = genomic DNA
ggtgaagaaaggagagtcgtggg

SEQ ID NO: 4525 - DNA, 23 bp, Homo sapiens
  source 1..23: mol_type = genomic DNA
ggcaagcttgcctaaaagtgagg

SEQ ID NO: 4526 - DNA, 23 bp, Homo sapiens
  source 1..23: mol_type = genomic DNA
ttgtggagagaactacgctaggg

SEQ ID NO: 4527 - DNA, 23 bp, Homo sapiens
  source 1..23: mol_type = genomic DNA
aatcaatttcaggcactgaacgg

SEQ ID NO: 4528 - DNA, 23 bp, Homo sapiens
  source 1..23: mol_type = genomic DNA
ggagtatctcgccacgtcagagg

SEQ ID NO: 4529 - DNA, 23 bp, Homo sapiens
  source 1..23: mol_type = genomic DNA
gagaggcatagggagaataacgg

SEQ ID NO: 4530 - DNA, 23 bp, Homo sapiens
  source 1..23: mol_type = genomic DNA
aaaaacctaactttagaacccgg

SEQ ID NO: 4531 - DNA, 23 bp, Homo sapiens
  source 1..23: mol_type = genomic DNA
gaacgttttatcatgatctgggg

SEQ ID NO: 4532 - DNA, 23 bp, Homo sapiens
  source 1..23: mol_type = genomic DNA
ttactgtgctaatccacacctgg

SEQ ID NO: 4533 - DNA, 23 bp, Homo sapiens
  source 1..23: mol_type = genomic DNA
gttataatccacatgataccagg

SEQ ID NO: 4534 - DNA, 23 bp, Homo sapiens
  source 1..23: mol_type = genomic DNA
ctatacaaacataccacccaggg

SEQ ID NO: 4535 - DNA, 23 bp, Homo sapiens
  source 1..23: mol_type = genomic DNA
tcacatactgagaactgcatagg

SEQ ID NO: 4536 - DNA, 23 bp, Homo sapiens
  source 1..23: mol_type = genomic DNA
ttgaacacttgctagctgcaagg

SEQ ID NO: 4537 - DNA, 23 bp, Homo sapiens
  source 1..23: mol_type = genomic DNA
gcaggcacaccactagaacacgg

SEQ ID NO: 4538 - DNA, 23 bp, Homo sapiens
  source 1..23: mol_type = genomic DNA
gataatgatattttaaaccaagg

SEQ ID NO: 4539 - DNA, 23 bp, Homo sapiens
  source 1..23: mol_type = genomic DNA
gtttgacatgaccgtaatggagg

SEQ ID NO: 4540 - DNA, 23 bp, Homo sapiens
  source 1..23: mol_type = genomic DNA
gtacactatttgtcaaccaaagg

SEQ ID NO: 4541 - DNA, 23 bp, Homo sapiens
  source 1..23: mol_type = genomic DNA
acatgccctttatggcacaatgg

SEQ ID NO: 4542 - DNA, 23 bp, Homo sapiens
  source 1..23: mol_type = genomic DNA
ttagcttacctataacaaagtgg

SEQ ID NO: 4543 - DNA, 23 bp, Homo sapiens
  source 1..23: mol_type = genomic DNA
attcacacatcaatcagaagtgg

SEQ ID NO: 4544 - DNA, 23 bp, Homo sapiens
  source 1..23: mol_type = genomic DNA
tacactataagataaatgtaggg

SEQ ID NO: 4545 - DNA, 23 bp, Homo sapiens
  source 1..23: mol_type = genomic DNA
gagagattgaaagactctgtagg

SEQ ID NO: 4546 - DNA, 23 bp, Homo sapiens
  source 1..23: mol_type = genomic DNA
actctgttggcacattgcagggg

SEQ ID NO: 4547 - DNA, 23 bp, Homo sapiens
  source 1..23: mol_type = genomic DNA
ccatacacaactgcaccgtaggg

SEQ ID NO: 4548 - DNA, 23 bp, Homo sapiens
  source 1..23: mol_type = genomic DNA
aattttctgtaaagtagcagagg

SEQ ID NO: 4549 - DNA, 23 bp, Homo sapiens
  source 1..23: mol_type = genomic DNA
aatttaatcacagcagtcaaggg

SEQ ID NO: 4550 - DNA, 23 bp, Homo sapiens
  source 1..23: mol_type = genomic DNA
cctctcgcgtcatagtttggggg

SEQ ID NO: 4551 - DNA, 23 bp, Homo sapiens
  source 1..23: mol_type = genomic DNA
acatagtacaaaattcatagagg

SEQ ID NO: 4552 - DNA, 23 bp, Homo sapiens
  source 1..23: mol_type = genomic DNA
acacaggttcataatgccacagg

SEQ ID NO: 4553 - DNA, 23 bp, Homo sapiens
  source 1..23: mol_type = genomic DNA
agacaaatctagaaacaactagg

SEQ ID NO: 4554 - DNA, 23 bp, Homo sapiens
  source 1..23: mol_type = genomic DNA
aatgtgttacagtaaggaggagg

SEQ ID NO: 4555 - DNA, 23 bp, Homo sapiens
  source 1..23: mol_type = genomic DNA
tctgtagtagagaatgttggagg

SEQ ID NO: 4556 - DNA, 23 bp, Homo sapiens
  source 1..23: mol_type = genomic DNA
actggaatccaggagccagatgg

SEQ ID NO: 4557 - DNA, 23 bp, Homo sapiens
  source 1..23: mol_type = genomic DNA
tcaatcctccagtttctaccggg

SEQ ID NO: 4558 - DNA, 23 bp, Homo sapiens
  source 1..23: mol_type = genomic DNA
taaatgttatcacctggaggtgg

SEQ ID NO: 4559 - DNA, 23 bp, Homo sapiens
  source 1..23: mol_type = genomic DNA
tagaatttgtaggagtaaggagg

SEQ ID NO: 4560 - DNA, 23 bp, Homo sapiens
  source 1..23: mol_type = genomic DNA
atgaggcctaagatttggagtgg

SEQ ID NO: 4561 - DNA, 23 bp, Homo sapiens
  source 1..23: mol_type = genomic DNA
ttttgaagagaaaatgtgggtgg

SEQ ID NO: 4562 - DNA, 23 bp, Homo sapiens
  source 1..23: mol_type = genomic DNA
ggatgaggagggcatagcagagg

SEQ ID NO: 4563 - DNA, 23 bp, Homo sapiens
  source 1..23: mol_type = genomic DNA
ctgtgtgtgatccatggggtagg

SEQ ID NO: 4564 - DNA, 23 bp, Homo sapiens
  source 1..23: mol_type = genomic DNA
acagccatcaaggtgtacttggg

SEQ ID NO: 4565 - DNA, 23 bp, Homo sapiens
  source 1..23: mol_type = genomic DNA
gtatttgcttttcattgtggggg

SEQ ID NO: 4566 - DNA, 23 bp, Homo sapiens
  source 1..23: mol_type = genomic DNA
aggtctgtagtagagaatgttgg

SEQ ID NO: 4567 - DNA, 23 bp, Homo sapiens
  source 1..23: mol_type = genomic DNA
ggagaagaggaaggtctgaaagg

SEQ ID NO: 4568 - DNA, 23 bp, Homo sapiens
  source 1..23: mol_type = genomic DNA
tcaaacctgtagctctatggagg

SEQ ID NO: 4569 - DNA, 23 bp, Homo sapiens
  source 1..23: mol_type = genomic DNA
gactggtattgctagtagaacgg

SEQ ID NO: 4570 - DNA, 23 bp, Homo sapiens
  source 1..23: mol_type = genomic DNA
gaagctgttgaagagccttgtgg

SEQ ID NO: 4571 - DNA, 23 bp, Homo sapiens
  source 1..23: mol_type = genomic DNA
tcagctaagcatgctaacctcgg

SEQ ID NO: 4572 - DNA, 23 bp, Homo sapiens
  source 1..23: mol_type = genomic DNA
gatcagaggcttcagtagggagg

SEQ ID NO: 4573 - DNA, 23 bp, Homo sapiens
  source 1..23: mol_type = genomic DNA
ttcatagcaagacaatagatggg

SEQ ID NO: 4574 - DNA, 23 bp, Homo sapiens
  source 1..23: mol_type = genomic DNA
tcaagctgaatacaattcagtgg

SEQ ID NO: 4575 - DNA, 23 bp, Homo sapiens
  source 1..23: mol_type = genomic DNA
taatcacctaccccgaccaatgg

SEQ ID NO: 4576 - DNA, 23 bp, Homo sapiens
  source 1..23: mol_type = genomic DNA
tcaaagatgtagactgacactgg

SEQ ID NO: 4577 - DNA, 23 bp, Homo sapiens
  source 1..23: mol_type = genomic DNA
gtagaactgtatgtacatgaagg

SEQ ID NO: 4578 - DNA, 23 bp, Homo sapiens
  source 1..23: mol_type = genomic DNA
catgtagctaaggttgctaacgg

SEQ ID NO: 4579 - DNA, 23 bp, Homo sapiens
  source 1..23: mol_type = genomic DNA
ccttgggatgggaaacacaatgg

SEQ ID NO: 4580 - DNA, 23 bp, Homo sapiens
  source 1..23: mol_type = genomic DNA
ctttcatacaataccctgaaggg

SEQ ID NO: 4581 - DNA, 23 bp, Homo sapiens
  source 1..23: mol_type = genomic DNA
ctaattacaatctatcccaatgg

SEQ ID NO: 4582 - DNA, 23 bp, Homo sapiens
  source 1..23: mol_type = genomic DNA
gttccctgcttgaagtacccggg

SEQ ID NO: 4583 - DNA, 23 bp, Homo sapiens
  source 1..23: mol_type = genomic DNA
gtaaacatcagaagacctcaagg

SEQ ID NO: 4584 - DNA, 23 bp, Homo sapiens
  source 1..23: mol_type = genomic DNA
acacagctgatataatttggtgg

SEQ ID NO: 4585 - DNA, 23 bp, Homo sapiens
  source 1..23: mol_type = genomic DNA
acataggcaatagtaaatcaggg

SEQ ID NO: 4586 - DNA, 23 bp, Homo sapiens
  source 1..23: mol_type = genomic DNA
ttgagcactgtgtttgctggagg

SEQ ID NO: 4587 - DNA, 23 bp, Homo sapiens
  source 1..23: mol_type = genomic DNA
agtataatatgtgcaaaactggg

SEQ ID NO: 4588 - DNA, 23 bp, Homo sapiens
  source 1..23: mol_type = genomic DNA
tgttactagaactaaaatgaggg

SEQ ID NO: 4589 - DNA, 23 bp, Homo sapiens
  source 1..23: mol_type = genomic DNA
tttgactgggctattctgggagg

SEQ ID NO: 4590 - DNA, 23 bp, Homo sapiens
  source 1..23: mol_type = genomic DNA
gcatgtctaagaacatccctagg

SEQ ID NO: 4591 - DNA, 23 bp, Homo sapiens
  source 1..23: mol_type = genomic DNA
cgagcagagctattgtgccatgg

SEQ ID NO: 4592 - DNA, 23 bp, Homo sapiens
  source 1..23: mol_type = genomic DNA
tctattggaggaaatacagatgg

SEQ ID NO: 4593 - DNA, 23 bp, Homo sapiens
  source 1..23: mol_type = genomic DNA
aggtaattgggaaatccagttgg

SEQ ID NO: 4594 - DNA, 23 bp, Homo sapiens
  source 1..23: mol_type = genomic DNA
gtggtaagcagtctccagaatgg

SEQ ID NO: 4595 - DNA, 23 bp, Homo sapiens
  source 1..23: mol_type = genomic DNA
ataaagggttcaaaaatctgtgg

SEQ ID NO: 4596 - DNA, 23 bp, Homo sapiens
  source 1..23: mol_type = genomic DNA
tacaatttcctcaaaaactgggg

SEQ ID NO: 4597 - DNA, 23 bp, Homo sapiens
  source 1..23: mol_type = genomic DNA
ccacaatgatcgtgtaagcaagg

SEQ ID NO: 4598 - DNA, 23 bp, Homo sapiens
  source 1..23: mol_type = genomic DNA
gagaacactttttagagccaggg

SEQ ID NO: 4599 - DNA, 23 bp, Homo sapiens
  source 1..23: mol_type = genomic DNA
agctccaaatttaagaaacacgg

SEQ ID NO: 4600 - DNA, 23 bp, Homo sapiens
  source 1..23: mol_type = genomic DNA
cctggctgcctcttagcacaggg

SEQ ID NO: 4601 - DNA, 23 bp, Homo sapiens
  source 1..23: mol_type = genomic DNA
tttcagaaaggagaaacccatgg

SEQ ID NO: 4602 - DNA, 23 bp, Homo sapiens
  source 1..23: mol_type = genomic DNA
aacactttggtaacaacagtagg

SEQ ID NO: 4603 - DNA, 23 bp, Homo sapiens
  source 1..23: mol_type = genomic DNA
cattccactaaacataacgatgg

SEQ ID NO: 4604 - DNA, 23 bp, Homo sapiens
  source 1..23: mol_type = genomic DNA
gtgatctacaagagaagttgggg

SEQ ID NO: 4605 - DNA, 23 bp, Homo sapiens
  source 1..23: mol_type = genomic DNA
cctagtcttgcaaatgctagggg

SEQ ID NO: 4606 - DNA, 23 bp, Homo sapiens
  source 1..23: mol_type = genomic DNA
ttgggtaacgagatcactaaggg

SEQ ID NO: 4607 - DNA, 23 bp, Homo sapiens
  source 1..23: mol_type = genomic DNA
tatatagcttccaagaatgaggg

SEQ ID NO: 4608 - DNA, 23 bp, Homo sapiens
  source 1..23: mol_type = genomic DNA
acccttcacatgataaaatgggg

SEQ ID NO: 4609 - DNA, 23 bp, Homo sapiens
  source 1..23: mol_type = genomic DNA
attacaaaaaggacaagccatgg

SEQ ID NO: 4610 - DNA, 23 bp, Homo sapiens
  source 1..23: mol_type = genomic DNA
accaaacagtggcattgaagagg

SEQ ID NO: 4611 - DNA, 23 bp, Homo sapiens
  source 1..23: mol_type = genomic DNA
cacaggcatctagatatggcagg

SEQ ID NO: 4612 - DNA, 23 bp, Homo sapiens
  source 1..23: mol_type = genomic DNA
tatatgttgcggcaatgaagagg

SEQ ID NO: 4613 - DNA, 23 bp, Homo sapiens
  source 1..23: mol_type = genomic DNA
gtcttgatgatgccaatgctagg

SEQ ID NO: 4614 - DNA, 23 bp, Homo sapiens
  source 1..23: mol_type = genomic DNA
taccaagtttccatttacaaggg

SEQ ID NO: 4615 - DNA, 23 bp, Homo sapiens
  source 1..23: mol_type = genomic DNA
taatttgtcttggaatgatgcgg

SEQ ID NO: 4616 - DNA, 23 bp, Homo sapiens
  source 1..23: mol_type = genomic DNA
caacataataggacagcccaggg

SEQ ID NO: 4617 - DNA, 23 bp, Homo sapiens
  source 1..23: mol_type = genomic DNA
gtattaccggttgtctaaggggg

SEQ ID NO: 4618 - DNA, 23 bp, Homo sapiens
  source 1..23: mol_type = genomic DNA
ggattgatcccaggtacatgtgg

SEQ ID NO: 4619 - DNA, 23 bp, Homo sapiens
  source 1..23: mol_type = genomic DNA
gtgtaatgttatgaaagaaaggg

SEQ ID NO: 4620 - DNA, 23 bp, Homo sapiens
  source 1..23: mol_type = genomic DNA
acaaacagatgagtttcagtggg

SEQ ID NO: 4621 - DNA, 23 bp, Homo sapiens
  source 1..23: mol_type = genomic DNA
gcagatcagaggcttcagtaggg

SEQ ID NO: 4622 - DNA, 23 bp, Homo sapiens
  source 1..23: mol_type = genomic DNA
ctatgcctctcacagccagaagg

SEQ ID NO: 4623 - DNA, 23 bp, Homo sapiens
  source 1..23: mol_type = genomic DNA
agtttgtaagtatattaggaagg

SEQ ID NO: 4624 - DNA, 23 bp, Homo sapiens
  source 1..23: mol_type = genomic DNA
cattaactcaatcagagtcccgg

SEQ ID NO: 4625 - DNA, 23 bp, Homo sapiens
  source 1..23: mol_type = genomic DNA
taaacccaaggctttaagagtgg

SEQ ID NO: 4626 - DNA, 23 bp, Homo sapiens
  source 1..23: mol_type = genomic DNA
agacaaaaccccagagaaagggg

SEQ ID NO: 4627 - DNA, 23 bp, Homo sapiens
  source 1..23: mol_type = genomic DNA
ataaaagagtgcccagatgaggg

SEQ ID NO: 4628 - DNA, 23 bp, Homo sapiens
  source 1..23: mol_type = genomic DNA
atattttgtacacatatgaaagg

SEQ ID NO: 4629 - DNA, 23 bp, Homo sapiens
  source 1..23: mol_type = genomic DNA
acataaagaagacttaaactagg

SEQ ID NO: 4630 - DNA, 23 bp, Homo sapiens
  source 1..23: mol_type = genomic DNA
tgccatggcatgaaatccaaagg

SEQ ID NO: 4631 - DNA, 23 bp, Homo sapiens
  source 1..23: mol_type = genomic DNA
tcaatggtagttggtcatgatgg

SEQ ID NO: 4632 - DNA, 23 bp, Homo sapiens
  source 1..23: mol_type = genomic DNA
gtacccacccaggtagattgtgg

SEQ ID NO: 4633 - DNA, 23 bp, Homo sapiens
  source 1..23: mol_type = genomic DNA
gctcagagctcacctactaaggg

SEQ ID NO: 4634 - DNA, 23 bp, Homo sapiens
  source 1..23: mol_type = genomic DNA
agtctgactttgctcagtgaagg

SEQ ID NO: 4635 - DNA, 23 bp, Homo sapiens
  source 1..23: mol_type = genomic DNA
ttctcttgtagatcaccagtggg

SEQ ID NO: 4636 - DNA, 23 bp, Homo sapiens
  source 1..23: mol_type = genomic DNA
tctatgagtactcagttccaggg

SEQ ID NO: 4637 - DNA, 23 bp, Homo sapiens
  source 1..23: mol_type = genomic DNA
gcttactaatggatgtcactagg

SEQ ID NO: 4638 - DNA, 23 bp, Homo sapiens
  source 1..23: mol_type = genomic DNA
gtcctgctagatcaggcataggg

SEQ ID NO: 4639 - DNA, 23 bp, Homo sapiens
  source 1..23: mol_type = genomic DNA
cagctgatctatcacgtcatggg

SEQ ID NO: 4640 - DNA, 23 bp, Homo sapiens
  source 1..23: mol_type = genomic DNA
gcttagggagatcactctgttgg

SEQ ID NO: 4641 - DNA, 23 bp, Homo sapiens
  source 1..23: mol_type = genomic DNA
tgactacacttctgacaccctgg

SEQ ID NO: 4642 - DNA, 23 bp, Homo sapiens
  source 1..23: mol_type = genomic DNA
attgtggagagaactacgctagg

SEQ ID NO: 4643 - DNA, 23 bp, Homo sapiens
  source 1..23: mol_type = genomic DNA
acaaaaccccagagaaagggggg

SEQ ID NO: 4644 - DNA, 23 bp, Homo sapiens
  source 1..23: mol_type = genomic DNA
gggaggatacaccctcatctggg

SEQ ID NO: 4645 - DNA, 23 bp, Homo sapiens
  source 1..23: mol_type = genomic DNA
ctcctggtagcaaacaatgaggg

SEQ ID NO: 4646 - DNA, 23 bp, Homo sapiens
  source 1..23: mol_type = genomic DNA
aattccattggaatgacggaagg

SEQ ID NO: 4647 - DNA, 23 bp, Homo sapiens
  source 1..23: mol_type = genomic DNA
atcatgttctcaagaagaccagg

SEQ ID NO: 4648 - DNA, 23 bp, Homo sapiens
  source 1..23: mol_type = genomic DNA
tatgaaagtgacaaagcaagtgg

SEQ ID NO: 4649 - DNA, 23 bp, Homo sapiens
  source 1..23: mol_type = genomic DNA
gttcctagctgtacttactctgg

SEQ ID NO: 4650 - DNA, 23 bp, Homo sapiens
  source 1..23: mol_type = genomic DNA
agatgtttatattctgacgaagg

SEQ ID NO: 4651 - DNA, 23 bp, Homo sapiens
  source 1..23: mol_type = genomic DNA
agtgtcaataaaggattcagagg

SEQ ID NO: 4652 - DNA, 23 bp, Homo sapiens
  source 1..23: mol_type = genomic DNA
cttgatcttaagtatggggaggg

SEQ ID NO: 4653 - DNA, 23 bp, Homo sapiens
  source 1..23: mol_type = genomic DNA
ctgtattctgtaattgctagggg

SEQ ID NO: 4654 - DNA, 23 bp, Homo sapiens
  source 1..23: mol_type = genomic DNA
tagtaatgcttatcttgccgagg

SEQ ID NO: 4655 - DNA, 23 bp, Homo sapiens
  source 1..23: mol_type = genomic DNA
acatcagaccgtgggaacggggg

SEQ ID NO: 4656 - DNA, 23 bp, Homo sapiens
  source 1..23: mol_type = genomic DNA
atgtaatagtcaatacgcccagg

SEQ ID NO: 4657 - DNA, 23 bp, Homo sapiens
  source 1..23: mol_type = genomic DNA
ggaggcaagcatagatcttgggg

SEQ ID NO: 4658 - DNA, 23 bp, Homo sapiens
  source 1..23: mol_type = genomic DNA
ctgatggcataggctccagatgg

SEQ ID NO: 4659 - DNA, 23 bp, Homo sapiens
  source 1..23: mol_type = genomic DNA
tttgaaacaacaagcaaggaggg

SEQ ID NO: 4660 - DNA, 23 bp, Homo sapiens
  source 1..23: mol_type = genomic DNA
ttgtatggtgtctatatacgtgg

SEQ ID NO: 4661 - DNA, 23 bp, Homo sapiens
  source 1..23: mol_type = genomic DNA
aatgttattgagtttatctgtgg

SEQ ID NO: 4662 - DNA, 23 bp, Homo sapiens
  source 1..23: mol_type = genomic DNA
tgttaaacctagcaaaagagtgg

SEQ ID NO: 4663 - DNA, 23 bp, Homo sapiens
  source 1..23: mol_type = genomic DNA
gcttcagcctaccttagactagg

SEQ ID NO: 4664 - DNA, 23 bp, Homo sapiens
  source 1..23: mol_type = genomic DNA
ttaaaatattgaaatagcgaggg

SEQ ID NO: 4665 - DNA, 23 bp, Homo sapiens
  source 1..23: mol_type = genomic DNA
gtgtatttgcagactatcagtgg

SEQ ID NO: 4666 - DNA, 23 bp, Homo sapiens
  source 1..23: mol_type = genomic DNA
attagcacatcttaacccatagg

SEQ ID NO: 4667 - DNA, 23 bp, Homo sapiens
  source 1..23: mol_type = genomic DNA
aattgatcgcgatagcagtaggg

SEQ ID NO: 4668 - DNA, 23 bp, Homo sapiens
  source 1..23: mol_type = genomic DNA
gagctaaaaggctcccccaaagg

SEQ ID NO: 4669 - DNA, 23 bp, Homo sapiens
  source 1..23: mol_type = genomic DNA
tatgctagtacatcagacatagg

SEQ ID NO: 4670 - DNA, 23 bp, Homo sapiens
  source 1..23: mol_type = genomic DNA
gcaaagtacctaagtaacaaagg

SEQ ID NO: 4671 - DNA, 23 bp, Homo sapiens
  source 1..23: mol_type = genomic DNA
acattggatgagtagacgaatgg

SEQ ID NO: 4672 - DNA, 23 bp, Homo sapiens
  source 1..23: mol_type = genomic DNA
ggttggagtacttacaagaacgg

SEQ ID NO: 4673 - DNA, 23 bp, Homo sapiens
  source 1..23: mol_type = genomic DNA
atgatggctgatatttcccatgg

SEQ ID NO: 4674 - DNA, 23 bp, Homo sapiens
  source 1..23: mol_type = genomic DNA
aatgtgagcccatcaaaggcagg

SEQ ID NO: 4675 - DNA, 23 bp, Homo sapiens
  source 1..23: mol_type = genomic DNA
agtggagaaaagttcagaggggg

SEQ ID NO: 4676 - DNA, 23 bp, Homo sapiens
  source 1..23: mol_type = genomic DNA
agaagcatacaaagtatacaagg

SEQ ID NO: 4677 - DNA, 23 bp, Homo sapiens
  source 1..23: mol_type = genomic DNA
gatttggcttacaggttcagggg

SEQ ID NO: 4678 - DNA, 23 bp, Homo sapiens
  source 1..23: mol_type = genomic DNA
tccatagtcaatgatggcgatgg

SEQ ID NO: 4679 - DNA, 23 bp, Homo sapiens
  source 1..23: mol_type = genomic DNA
agcttacggcaaggatgcagggg

SEQ ID NO: 4680 - DNA, 23 bp, Homo sapiens
  source 1..23: mol_type = genomic DNA
tcttccggaatacaatgttgtgg

SEQ ID NO: 4681 - DNA, 23 bp, Homo sapiens
  source 1..23: mol_type = genomic DNA
taacatatacaattttacaaggg

SEQ ID NO: 4682 - DNA, 23 bp, Homo sapiens
  source 1..23: mol_type = genomic DNA
gaacagagatgtcatacagatgg

SEQ ID NO: 4683 - DNA, 23 bp, Homo sapiens
  source 1..23: mol_type = genomic DNA
agcatgataagcatgatgtaggg

SEQ ID NO: 4684 - DNA, 23 bp, Homo sapiens
  source 1..23: mol_type = genomic DNA
ataactgctttgccaatgtgagg

SEQ ID NO: 4685 - DNA, 23 bp, Homo sapiens
  source 1..23: mol_type = genomic DNA
tctgttctctgttataaaggagg

SEQ ID NO: 4686 - DNA, 23 bp, Homo sapiens
  source 1..23: mol_type = genomic DNA
aaagtggagaaaagttcagaggg

SEQ ID NO: 4687 - DNA, 23 bp, Homo sapiens
  source 1..23: mol_type = genomic DNA
atcatcacattcaggggcaaggg

SEQ ID NO: 4688 - DNA, 23 bp, Homo sapiens
  source 1..23: mol_type = genomic DNA
acagaatgtgccaagcgtgtagg

SEQ ID NO: 4689 - DNA, 23 bp, Homo sapiens
  source 1..23: mol_type = genomic DNA
ataaggactctgaaatgcaaggg

SEQ ID NO: 4690 - DNA, 23 bp, Homo sapiens
  source 1..23: mol_type = genomic DNA
aatcaggtaggcaggaaatgagg

SEQ ID NO: 4691 - DNA, 23 bp, Homo sapiens
  source 1..23: mol_type = genomic DNA
catcaatcagaagtggtgtaggg

SEQ ID NO: 4692 - DNA, 23 bp, Homo sapiens
  source 1..23: mol_type = genomic DNA
atcacatgtccaatattactggg

SEQ ID NO: 4693 - DNA, 23 bp, Homo sapiens
  source 1..23: mol_type = genomic DNA
ctcaagaagcaaacaaaccaagg

SEQ ID NO: 4694 - DNA, 23 bp, Homo sapiens
  source 1..23: mol_type = genomic DNA
tctgaacttcaaatacactctgg

SEQ ID NO: 4695 - DNA, 23 bp, Homo sapiens
  source 1..23: mol_type = genomic DNA
catcacacaatatatggccgtgg

SEQ ID NO: 4696 - DNA, 23 bp, Homo sapiens
  source 1..23: mol_type = genomic DNA
aaagaaccaaaaggaacccaagg

SEQ ID NO: 4697 - DNA, 23 bp, Homo sapiens
  source 1..23: mol_type = genomic DNA
cagttgagactacaccttggagg

SEQ ID NO: 4698 - DNA, 23 bp, Homo sapiens
  source 1..23: mol_type = genomic DNA
cagaagtgtcaaagttgagaggg

SEQ ID NO: 4699 - DNA, 23 bp, Homo sapiens
  source 1..23: mol_type = genomic DNA
taagagaaaatacagtctagagg

SEQ ID NO: 4700 - DNA, 23 bp, Homo sapiens
  source 1..23: mol_type = genomic DNA
actacacagagaaaagttgtggg

SEQ ID NO: 4701 - DNA, 23 bp, Homo sapiens
  source 1..23: mol_type = genomic DNA
gtagtaagtactgctttacatgg

SEQ ID NO: 4702 - DNA, 23 bp, Homo sapiens
  source 1..23: mol_type = genomic DNA
ctggcactgtagttaagagatgg

SEQ ID NO: 4703 - DNA, 23 bp, Homo sapiens
  source 1..23: mol_type = genomic DNA
gttggcctcaaagtaacagaagg

SEQ ID NO: 4704 - DNA, 23 bp, Homo sapiens
  source 1..23: mol_type = genomic DNA
acactgcactcagttgataacgg

SEQ ID NO: 4705 - DNA, 23 bp, Homo sapiens
  source 1..23: mol_type = genomic DNA
aaggatacttgggagcaggttgg

SEQ ID NO: 4706 - DNA, 23 bp, Homo sapiens
  source 1..23: mol_type = genomic DNA
cacacctcaggaatgcccactgg

SEQ ID NO: 4707 - DNA, 23 bp, Homo sapiens
  source 1..23: mol_type = genomic DNA
taatgtatccaagacaacattgg

SEQ ID NO: 4708 - DNA, 23 bp, Homo sapiens
  source 1..23: mol_type = genomic DNA
actccactccctctcttgaaggg

SEQ ID NO: 4709 - DNA, 23 bp, Homo sapiens
  source 1..23: mol_type = genomic DNA
aaatttgctgtgataaacagtgg

SEQ ID NO: 4710 - DNA, 23 bp, Homo sapiens
  source 1..23: mol_type = genomic DNA
gtagatattaaggcctgtggggg

SEQ ID NO: 4711 - DNA, 23 bp, Homo sapiens
  source 1..23: mol_type = genomic DNA
tgtgggtggcagtaagggaaggg

SEQ ID NO: 4712 - DNA, 23 bp, Homo sapiens
  source 1..23: mol_type = genomic DNA
aaatacacttactatcctaaggg

SEQ ID NO: 4713 - DNA, 23 bp, Homo sapiens
  source 1..23: mol_type = genomic DNA
gagttcacatgccagtaaagtgg

SEQ ID NO: 4714 - DNA, 23 bp, Homo sapiens
  source 1..23: mol_type = genomic DNA
gttagagagaaattatagagcgg

SEQ ID NO: 4715 - DNA, 23 bp, Homo sapiens
  source 1..23: mol_type = genomic DNA
cctgtggtgataaacagcattgg

SEQ ID NO: 4716 - DNA, 23 bp, Homo sapiens
  source 1..23: mol_type = genomic DNA
ggaaagggatgaagttgtgaagg

SEQ ID NO: 4717 - DNA, 23 bp, Homo sapiens
  source 1..23: mol_type = genomic DNA
gttcccactaggaaatagtaggg

SEQ ID NO: 4718 - DNA, 23 bp, Homo sapiens
  source 1..23: mol_type = genomic DNA
tttagaaatgggatatcctgggg

SEQ ID NO: 4719 - DNA, 23 bp, Homo sapiens
  source 1..23: mol_type = genomic DNA
acctggacattatgaaagagagg

SEQ ID NO: 4720 - DNA, 23 bp, Homo sapiens
  source 1..23: mol_type = genomic DNA
ttatttcctggaacagaacacgg

SEQ ID NO: 4721 - DNA, 23 bp, Homo sapiens
  source 1..23: mol_type = genomic DNA
aaataaggaactttgtcccaagg

SEQ ID NO: 4722 - DNA, 23 bp, Homo sapiens
  source 1..23: mol_type = genomic DNA
cattttggagattccatgtgtgg

SEQ ID NO: 4723 - DNA, 23 bp, Homo sapiens
  source 1..23: mol_type = genomic DNA
ttttatttaatacttttgggtgg

SEQ ID NO: 4724 - DNA, 23 bp, Homo sapiens
  source 1..23: mol_type = genomic DNA
tactgggagtctccgatagtggg

SEQ ID NO: 4725 - DNA, 23 bp, Homo sapiens
  source 1..23: mol_type = genomic DNA
caagtaatatggacagcacaagg

SEQ ID NO: 4726 - DNA, 23 bp, Homo sapiens
  source 1..23: mol_type = genomic DNA
taaaccttgattaaaagccaagg

SEQ ID NO: 4727 - DNA, 23 bp, Homo sapiens
  source 1..23: mol_type = genomic DNA
ttttccttatgtgtcagacgagg

SEQ ID NO: 4728 - DNA, 23 bp, Homo sapiens
  source 1..23: mol_type = genomic DNA
aacaacaaatataaaaaaggtgg

SEQ ID NO: 4729 - DNA, 23 bp, Homo sapiens
  source 1..23: mol_type = genomic DNA
gctactgaatgtttcatacctgg

SEQ ID NO: 4730 - DNA, 23 bp, Homo sapiens
  source 1..23: mol_type = genomic DNA
atctatctctttaggaccagggg

SEQ ID NO: 4731 - DNA, 23 bp, Homo sapiens
  source 1..23: mol_type = genomic DNA
ttaactataatagagcccttcgg

SEQ ID NO: 4732 - DNA, 23 bp, Homo sapiens
  source 1..23: mol_type = genomic DNA
ctttgggtggttaatcaagtcgg

SEQ ID NO: 4733 - DNA, 23 bp, Homo sapiens
  source 1..23: mol_type = genomic DNA
gtatcaaggtctcgatcgagagg

SEQ ID NO: 4734 - DNA, 23 bp, Homo sapiens
  source 1..23: mol_type = genomic DNA
ggggaaataatacttatcaaagg

SEQ ID NO: 4735 - DNA, 23 bp, Homo sapiens
  source 1..23: mol_type = genomic DNA
cttgccagtttttttcagtgggg

SEQ ID NO: 4736 - DNA, 23 bp, Homo sapiens
  source 1..23: mol_type = genomic DNA
ataacatttcaaaatgccctggg

SEQ ID NO: 4737 - DNA, 23 bp, Homo sapiens
  source 1..23: mol_type = genomic DNA
ggtgggtctatccaaggctgagg

SEQ ID NO: 4738 - DNA, 23 bp, Homo sapiens
  source 1..23: mol_type = genomic DNA
gggaagactggtatgtgtaaggg

SEQ ID NO: 4739 - DNA, 23 bp, Homo sapiens
  source 1..23: mol_type = genomic DNA
tttattaatgccagtgactgcgg

SEQ ID NO: 4740 - DNA, 23 bp, Homo sapiens
  source 1..23: mol_type = genomic DNA
tctctgtgtctctaacctgaggg

SEQ ID NO: 4741 - DNA, 23 bp, Homo sapiens
  source 1..23: mol_type = genomic DNA
catgtttacaggcatgggagagg

SEQ ID NO: 4742 - DNA, 23 bp, Homo sapiens
  source 1..23: mol_type = genomic DNA
tgtcttttgcctggaaaccaggg

SEQ ID NO: 4743 - DNA, 23 bp, Homo sapiens
  source 1..23: mol_type = genomic DNA
gaattacagcagaggaggcgagg

SEQ ID NO: 4744 - DNA, 23 bp, Homo sapiens
  source 1..23: mol_type = genomic DNA
ttccttatgtgtcagacgagggg

SEQ ID NO: 4745 - DNA, 23 bp, Homo sapiens
  source 1..23: mol_type = genomic DNA
ggtactagagttaaaagaagagg

SEQ ID NO: 4746 - DNA, 23 bp, Homo sapiens
  source 1..23: mol_type = genomic DNA
gatttccattaacgatggtgtgg

SEQ ID NO: 4747 - DNA, 23 bp, Homo sapiens
  source 1..23: mol_type = genomic DNA
aattcctcctccaaaaatcaggg

SEQ ID NO: 4748 - DNA, 23 bp, Homo sapiens
  source 1..23: mol_type = genomic DNA
atctagatatggcaggcagtagg

SEQ ID NO: 4749 - DNA, 23 bp, Homo sapiens
  source 1..23: mol_type = genomic DNA
tacagtctaaaatcaagagaagg

SEQ ID NO: 4750 - DNA, 23 bp, Homo sapiens
  source 1..23: mol_type = genomic DNA
gtttcatacctggtatcatgtgg

SEQ ID NO: 4751 - DNA, 23 bp, Homo sapiens
  source 1..23: mol_type = genomic DNA
gtttcttgcactaaaagatgagg

SEQ ID NO: 4752 - DNA, 23 bp, Homo sapiens
  source 1..23: mol_type = genomic DNA
tggaggatgaagaatgacaaggg

SEQ ID NO: 4753 - DNA, 23 bp, Homo sapiens
  source 1..23: mol_type = genomic DNA
tgatttgatcacagttcaggtgg

SEQ ID NO: 4754 - DNA, 23 bp, Homo sapiens
  source 1..23: mol_type = genomic DNA
gaaacagttttcctgccgaaggg

SEQ ID NO: 4755 - DNA, 23 bp, Homo sapiens
  source 1..23: mol_type = genomic DNA
taggcaagctgctacaaggaagg

SEQ ID NO: 4756 - DNA, 23 bp, Homo sapiens
  source 1..23: mol_type = genomic DNA
ttttgctcctggccaaaggaggg

SEQ ID NO: 4757 - DNA, 23 bp, Homo sapiens
  source 1..23: mol_type = genomic DNA
aaaaaatgttcaatcaaaggtgg

SEQ ID NO: 4758 - DNA, 23 bp, Homo sapiens
  source 1..23: mol_type = genomic DNA
atataattctaggaatccatagg

SEQ ID NO: 4759 - DNA, 23 bp, Homo sapiens
  source 1..23: mol_type = genomic DNA
tgaataataatgggaaatggagg

SEQ ID NO: 4760 - DNA, 23 bp, Homo sapiens
  source 1..23: mol_type = genomic DNA
tcttgcttcactttaatgtgagg

SEQ ID NO: 4761 - DNA, 23 bp, Homo sapiens
  source 1..23: mol_type = genomic DNA
atgtacttacatgattatgtagg

SEQ ID NO: 4762 - DNA, 23 bp, Homo sapiens
  source 1..23: mol_type = genomic DNA
tcccctacttttcctactgtagg

SEQ ID NO: 4763 - DNA, 23 bp, Homo sapiens
  source 1..23: mol_type = genomic DNA
ttacatccatgaagcagcaaggg

SEQ ID NO: 4764 - DNA, 23 bp, Homo sapiens
  source 1..23: mol_type = genomic DNA
aatgaggattctcagttaagggg

SEQ ID NO: 4765 - DNA, 23 bp, Homo sapiens
  source 1..23: mol_type = genomic DNA
cctaccacgggggtatgcatggg

SEQ ID NO: 4766 - DNA, 23 bp, Homo sapiens
  source 1..23: mol_type = genomic DNA
cctagggtataataggaggcagg

SEQ ID NO: 4767 - DNA, 23 bp, Homo sapiens
  source 1..23: mol_type = genomic DNA
caaagagtaaattactgaggagg

SEQ ID NO: 4768 - DNA, 23 bp, Homo sapiens
  source 1..23: mol_type = genomic DNA
tctccagtgatactttaacatgg

SEQ ID NO: 4769 - DNA, 23 bp, Homo sapiens
  source 1..23: mol_type = genomic DNA
ctcaggacaagtagatagggagg

SEQ ID NO: 4770 - DNA, 23 bp, Homo sapiens
  source 1..23: mol_type = genomic DNA
tgcaggatctaccggaaagtagg

SEQ ID NO: 4771 - DNA, 23 bp, Homo sapiens
  source 1..23: mol_type = genomic DNA
agttcaagagtcgatgaagaggg

SEQ ID NO: 4772 - DNA, 23 bp, Homo sapiens
  source 1..23: mol_type = genomic DNA
cataacatgttataaaacatagg

SEQ ID NO: 4773 - DNA, 23 bp, Homo sapiens
  source 1..23: mol_type = genomic DNA
acctcctatgtccacccccacgg

SEQ ID NO: 4774 - DNA, 23 bp, Homo sapiens
  source 1..23: mol_type = genomic DNA
tacatagatcttgtatcccaggg

SEQ ID NO: 4775 - DNA, 23 bp, Homo sapiens
  source 1..23: mol_type = genomic DNA
gatacaaataatgtagcgaaggg

SEQ ID NO: 4776 - DNA, 23 bp, Homo sapiens
  source 1..23: mol_type = genomic DNA
tagacagacccttacaggcatgg

SEQ ID NO: 4777 - DNA, 23 bp, Homo sapiens
  source 1..23: mol_type = genomic DNA
agataggtgatgaaaaagctggg

SEQ ID NO: 4778 - DNA, 23 bp, Homo sapiens
  source 1..23: mol_type = genomic DNA
agatgtagatgggatctcactgg

SEQ ID NO: 4779 - DNA, 23 bp, Homo sapiens
  source 1..23: mol_type = genomic DNA
gcaaggcagctatatagcaaagg

SEQ ID NO: 4780 - DNA, 23 bp, Homo sapiens
  source 1..23: mol_type = genomic DNA
ctattaccatgaaatacactagg

SEQ ID NO: 4781 - DNA, 23 bp, Homo sapiens
  source 1..23: mol_type = genomic DNA
caaattctatgaggtagagaggg

SEQ ID NO: 4782 - DNA, 23 bp, Homo sapiens
  source 1..23: mol_type = genomic DNA
ccctaggggtgtaatcaagaggg

SEQ ID NO: 4783 - DNA, 23 bp, Homo sapiens
  source 1..23: mol_type = genomic DNA
tagtttccgtactcccctagtgg

SEQ ID NO: 4784 - DNA, 23 bp, Homo sapiens
  source 1..23: mol_type = genomic DNA
tttagaattcacttacacaatgg

SEQ ID NO: 4785 - DNA, 23 bp, Homo sapiens
  source 1..23: mol_type = genomic DNA
agagaaggagatttacctgatgg

SEQ ID NO: 4786 - DNA, 23 bp, Homo sapiens
  source 1..23: mol_type = genomic DNA
atacattagatttatgcagaggg

SEQ ID NO: 4787 - DNA, 23 bp, Homo sapiens
  source 1..23: mol_type = genomic DNA
gacaagacctgtaaatgcccggg

SEQ ID NO: 4788 - DNA, 23 bp, Homo sapiens
  source 1..23: mol_type = genomic DNA
acccccagtaagagagaaggagg

SEQ ID NO: 4789 - DNA, 23 bp, Homo sapiens
  source 1..23: mol_type = genomic DNA
ttatgaacctgtgtaatcatggg

SEQ ID NO: 4790 - DNA, 23 bp, Homo sapiens
  source 1..23: mol_type = genomic DNA
tctcacttcttattaacagaggg

SEQ ID NO: 4791 - DNA, 23 bp, Homo sapiens
  source 1..23: mol_type = genomic DNA
gaactgagtgggctcagtgtggg

SEQ ID NO: 4792 - DNA, 23 bp, Homo sapiens
  source 1..23: mol_type = genomic DNA
atagatacaagtatattgaaagg

SEQ ID NO: 4793 - DNA, 23 bp, Homo sapiens
  source 1..23: mol_type = genomic DNA
gagtccttatcagtattcaaagg

SEQ ID NO: 4794 - DNA, 23 bp, Homo sapiens
  source 1..23: mol_type = genomic DNA
ttagaataatcaggaaccagtgg

SEQ ID NO: 4795 - DNA, 23 bp, Homo sapiens
  source 1..23: mol_type = genomic DNA
ttctttcccaaggccaagagggg

SEQ ID NO: 4796 - DNA, 23 bp, Homo sapiens
  source 1..23: mol_type = genomic DNA
agcaagaaggtaaccaaaagggg

SEQ ID NO: 4797 - DNA, 23 bp, Homo sapiens
  source 1..23: mol_type = genomic DNA
caggcagaaggcatttccagagg

SEQ ID NO: 4798 - DNA, 23 bp, Homo sapiens
  source 1..23: mol_type = genomic DNA
gatcttgttacctgaatcagggg

SEQ ID NO: 4799 - DNA, 23 bp, Homo sapiens
  source 1..23: mol_type = genomic DNA
gcatcactcaataccatggtagg

SEQ ID NO: 4800 - DNA, 23 bp, Homo sapiens
  source 1..23: mol_type = genomic DNA
aattacaaatccctagacattgg

SEQ ID NO: 4801 - DNA, 23 bp, Homo sapiens
  source 1..23: mol_type = genomic DNA
tttcttgcactaaaagatgaggg

SEQ ID NO: 4802 - DNA, 23 bp, Homo sapiens
  source 1..23: mol_type = genomic DNA
ggtgacagttttagttcacaggg

SEQ ID NO: 4803 - DNA, 23 bp, Homo sapiens
  source 1..23: mol_type = genomic DNA
attccatcagaaaaaatggtggg

SEQ ID NO: 4804 - DNA, 23 bp, Homo sapiens
  source 1..23: mol_type = genomic DNA
atgtatacttaggtgtctgtagg

SEQ ID NO: 4805 - DNA, 23 bp, Homo sapiens
  source 1..23: mol_type = genomic DNA
tacaaaatcagacccatagaggg

SEQ ID NO: 4806 - DNA, 23 bp, Homo sapiens
  source 1..23: mol_type = genomic DNA
tctgaacatgtgtaaagcaaggg

SEQ ID NO: 4807 - DNA, 23 bp, Homo sapiens
  source 1..23: mol_type = genomic DNA
acttattattttgtcatacacgg

SEQ ID NO: 4808 - DNA, 23 bp, Homo sapiens
  source 1..23: mol_type = genomic DNA
tttactatatatataagttgggg

SEQ ID NO: 4809 - DNA, 23 bp, Homo sapiens
  source 1..23: mol_type = genomic DNA
ctagcgagctaaaccaaagaggg

SEQ ID NO: 4810 - DNA, 23 bp, Homo sapiens
  source 1..23: mol_type = genomic DNA
gtggctggattcacaaagctggg

SEQ ID NO: 4811 - DNA, 23 bp, Homo sapiens
  source 1..23: mol_type = genomic DNA
cgagattctttcctctcaggggg

SEQ ID NO: 4812 - DNA, 23 bp, Homo sapiens
  source 1..23: mol_type = genomic DNA
tccagaggcacacactggaatgg

SEQ ID NO: 4813 - DNA, 23 bp, Homo sapiens
  source 1..23: mol_type = genomic DNA
ccatatgcctagtctaaggtagg

SEQ ID NO: 4814 - DNA, 23 bp, Homo sapiens
  source 1..23: mol_type = genomic DNA
ttcaatcttttccaaagccgagg

SEQ ID NO: 4815 - DNA, 23 bp, Homo sapiens
  source 1..23: mol_type = genomic DNA
atacacacacttttttttggggg

SEQ ID NO: 4816 - DNA, 23 bp, Homo sapiens
  source 1..23: mol_type = genomic DNA
taaaaaatatcttctatcagagg

SEQ ID NO: 4817 - DNA, 23 bp, Homo sapiens
  source 1..23: mol_type = genomic DNA
atgtttttagaaaacatcacagg

SEQ ID NO: 4818 - DNA, 23 bp, Homo sapiens
  source 1..23: mol_type = genomic DNA
gacaatgctagttttagtagggg

SEQ ID NO: 4819 - DNA, 23 bp, Homo sapiens
  source 1..23: mol_type = genomic DNA
ttccattgaagacattaagacgg

SEQ ID NO: 4820 - DNA, 23 bp, Homo sapiens
  source 1..23: mol_type = genomic DNA
tacatagtcactttataagaggg

SEQ ID NO: 4821 - DNA, 23 bp, Homo sapiens
  source 1..23: mol_type = genomic DNA
taccttcttggcatcaaacaggg

SEQ ID NO: 4822 - DNA, 23 bp, Homo sapiens
  source 1..23: mol_type = genomic DNA
ggttgactgacagtggtctaggg

SEQ ID NO: 4823 - DNA, 23 bp, Homo sapiens
  source 1..23: mol_type = genomic DNA
ctgagaaaatcatcagtccaggg

SEQ ID NO: 4824 - DNA, 23 bp, Homo sapiens
  source 1..23: mol_type = genomic DNA
aaatatggcccttaaacccaagg

SEQ ID NO: 4825 - DNA, 23 bp, Homo sapiens
  source 1..23: mol_type = genomic DNA
aacaatgaaacattttacccagg

SEQ ID NO: 4826 - DNA, 23 bp, Homo sapiens
  source 1..23: mol_type = genomic DNA
tgttctgcagcaggttaagtggg

SEQ ID NO: 4827 - DNA, 23 bp, Homo sapiens
  source 1..23: mol_type = genomic DNA
cttttatttactcttgtgggtgg

SEQ ID NO: 4828 - DNA, 23 bp, Homo sapiens
  source 1..23: mol_type = genomic DNA
gaaaagggagagtgagaacgagg

SEQ ID NO: 4829 - DNA, 23 bp, Homo sapiens
  source 1..23: mol_type = genomic DNA
tttactttacctctgacagtagg

SEQ ID NO: 4830 - DNA, 23 bp, Homo sapiens
  source 1..23: mol_type = genomic DNA
catttgtctcagagcaatgatgg

SEQ ID NO: 4831 - DNA, 23 bp, Homo sapiens
  source 1..23: mol_type = genomic DNA
ttcagtttgtgaatgtcatgtgg

SEQ ID NO: 4832 - DNA, 23 bp, Homo sapiens
  source 1..23: mol_type = genomic DNA
caaccttcccatatgtgtggagg

SEQ ID NO: 4833 - DNA, 23 bp, Homo sapiens
  source 1..23: mol_type = genomic DNA
tttgtctagtgactgacagaagg

SEQ ID NO: 4834 - DNA, 23 bp, Homo sapiens
  source 1..23: mol_type = genomic DNA
gatttgaagaagaatatggaggg

SEQ ID NO: 4835 - DNA, 23 bp, Homo sapiens
  source 1..23: mol_type = genomic DNA
ggtttaattttggataagtgggg

SEQ ID NO: 4836 - DNA, 23 bp, Homo sapiens
  source 1..23: mol_type = genomic DNA
atctgagaggacgacagctaggg

SEQ ID NO: 4837 - DNA, 23 bp, Homo sapiens
  source 1..23: mol_type = genomic DNA
agcagatcagaggcttcagtagg

SEQ ID NO: 4838 - DNA, 23 bp, Homo sapiens
  source 1..23: mol_type = genomic DNA
atttaaactaatcttagtggtgg

SEQ ID NO: 4839 - DNA, 23 bp, Homo sapiens
  source 1..23: mol_type = genomic DNA
ggcatacaggaattttttggggg

SEQ ID NO: 4840 - DNA, 23 bp, Homo sapiens
  source 1..23: mol_type = genomic DNA
gtaggaagtacataagacatagg

SEQ ID NO: 4841 - DNA, 23 bp, Homo sapiens
  source 1..23: mol_type = genomic DNA
ccaccaatttaactgtaactcgg

SEQ ID NO: 4842 - DNA, 23 bp, Homo sapiens
  source 1..23: mol_type = genomic DNA
tccttatgtgtcagacgaggggg

SEQ ID NO: 4843 - DNA, 23 bp, Homo sapiens
  source 1..23: mol_type = genomic DNA
acattatgtaagactagcccagg

SEQ ID NO: 4844 - DNA, 23 bp, Homo sapiens
  source 1..23: mol_type = genomic DNA
acccacctattcatttcccaagg

SEQ ID NO: 4845 - DNA, 23 bp, Homo sapiens
  source 1..23: mol_type = genomic DNA
aagtacagttctctttctaacgg

SEQ ID NO: 4846 - DNA, 23 bp, Homo sapiens
  source 1..23: mol_type = genomic DNA
tttaaagttaattttataggggg

SEQ ID NO: 4847 - DNA, 23 bp, Homo sapiens
  source 1..23: mol_type = genomic DNA
ttgtctttctggaaatgaggagg

SEQ ID NO: 4848 - DNA, 23 bp, Homo sapiens
  source 1..23: mol_type = genomic DNA
tcacatgatattgcccaaagagg

SEQ ID NO: 4849 - DNA, 23 bp, Homo sapiens
  source 1..23: mol_type = genomic DNA
gcatcgttttggagtgtgcatgg

SEQ ID NO: 4850 - DNA, 23 bp, Homo sapiens
  source 1..23: mol_type = genomic DNA
agtcctatgagaagcaggcaggg

SEQ ID NO: 4851 - DNA, 23 bp, Homo sapiens
  source 1..23: mol_type = genomic DNA
gaaaagtgaagacatttgaaggg

SEQ ID NO: 4852 - DNA, 23 bp, Homo sapiens
  source 1..23: mol_type = genomic DNA
ttactttatgtagctactgaggg

SEQ ID NO: 4853 - DNA, 23 bp, Homo sapiens
  source 1..23: mol_type = genomic DNA
gtagcagaggtaaattgccatgg

SEQ ID NO: 4854 - DNA, 23 bp, Homo sapiens
  source 1..23: mol_type = genomic DNA
cacccctagggtataataggagg

SEQ ID NO: 4855 - DNA, 23 bp, Homo sapiens
  source 1..23: mol_type = genomic DNA
agtcctgctagatcaggcatagg

SEQ ID NO: 4856 - DNA, 23 bp, Homo sapiens
  source 1..23: mol_type = genomic DNA
tagtgataaatcgaataagttgg

SEQ ID NO: 4857 - DNA, 23 bp, Homo sapiens
  source 1..23: mol_type = genomic DNA
ttcctaattcttgatccaagtgg

SEQ ID NO: 4858 - DNA, 23 bp, Homo sapiens
  source 1..23: mol_type = genomic DNA
gcatttgagatagccagtgatgg

SEQ ID NO: 4859 - DNA, 23 bp, Homo sapiens
  source 1..23: mol_type = genomic DNA
cctttaaatgaagatcacattgg

SEQ ID NO: 4860 - DNA, 23 bp, Homo sapiens
  source 1..23: mol_type = genomic DNA
ctaaaatgtgagcccatcaaagg

SEQ ID NO: 4861 - DNA, 23 bp, Homo sapiens
  source 1..23: mol_type = genomic DNA
tgagttggtaaacaaccttaagg

SEQ ID NO: 4862 - DNA, 23 bp, Homo sapiens
  source 1..23: mol_type = genomic DNA
tggagcctagacagagacattgg

SEQ ID NO: 4863 - DNA, 23 bp, Homo sapiens
  source 1..23: mol_type = genomic DNA
taaagtgaaccaaatcaaagtgg

SEQ ID NO: 4864 - DNA, 23 bp, Homo sapiens
  source 1..23: mol_type = genomic DNA
gctaaggcctggaagcctcaagg

SEQ ID NO: 4865 - DNA, 23 bp, Homo sapiens
  source 1..23: mol_type = genomic DNA
gctcttgtggttacaacaagagg

SEQ ID NO: 4866 - DNA, 23 bp, Homo sapiens
  source 1..23: mol_type = genomic DNA
tctaccctgatttttggaggagg

SEQ ID NO: 4867 - DNA, 23 bp, Homo sapiens
  source 1..23: mol_type = genomic DNA
aagaaacccagcaagctgaaagg

SEQ ID NO: 4868 - DNA, 23 bp, Homo sapiens
  source 1..23: mol_type = genomic DNA
aatataacctcaattgcaagagg

SEQ ID NO: 4869 - DNA, 23 bp, Homo sapiens
  source 1..23: mol_type = genomic DNA
tgccagttccctgtgctaagagg

SEQ ID NO: 4870 - DNA, 23 bp, Homo sapiens
  source 1..23: mol_type = genomic DNA
aggttgtttaccaactcagtagg

SEQ ID NO: 4871 - DNA, 23 bp, Homo sapiens
  source 1..23: mol_type = genomic DNA
tttccttatgtgtcagacgaggg

SEQ ID NO: 4872 - DNA, 23 bp, Homo sapiens
  source 1..23: mol_type = genomic DNA
gggattctgaagaagttcctggg

SEQ ID NO: 4873 - DNA, 23 bp, Homo sapiens
  source 1..23: mol_type = genomic DNA
cctaaactttggtgtgcaggagg

SEQ ID NO: 4874 - DNA, 23 bp, Homo sapiens
  source 1..23: mol_type = genomic DNA
ccatggggtaggatggttcgagg

SEQ ID NO: 4875 - DNA, 23 bp, Homo sapiens
  source 1..23: mol_type = genomic DNA
cttactttatgtagctactgagg

SEQ ID NO: 4876 - DNA, 23 bp, Homo sapiens
  source 1..23: mol_type = genomic DNA
agttaatatcaaattctatgagg

SEQ ID NO: 4877 - DNA, 23 bp, Homo sapiens
  source 1..23: mol_type = genomic DNA
tacttttagtgtcaacaaagagg

SEQ ID NO: 4878 - DNA, 23 bp, Homo sapiens
  source 1..23: mol_type = genomic DNA
tttcatggaacaaaaagtcacgg

SEQ ID NO: 4879 - DNA, 23 bp, Homo sapiens
  source 1..23: mol_type = genomic DNA
ccaaaggactgaaacttgaaagg

SEQ ID NO: 4880 - DNA, 23 bp, Homo sapiens
  source 1..23: mol_type = genomic DNA
ttaggattagcttatcccaaagg

SEQ ID NO: 4881 - DNA, 23 bp, Homo sapiens
  source 1..23: mol_type = genomic DNA
aaaaatgtcttcgatctacaagg

SEQ ID NO: 4882 - DNA, 23 bp, Homo sapiens
  source 1..23: mol_type = genomic DNA
tgtgtaatcatgggtagtgttgg

SEQ ID NO: 4883 - DNA, 23 bp, Homo sapiens
  source 1..23: mol_type = genomic DNA
cagctagtaatgtaaaatggtgg

SEQ ID NO: 4884 - DNA, 23 bp, Homo sapiens
  source 1..23: mol_type = genomic DNA
acattaatatcatcatcaaacgg

SEQ ID NO: 4885 - DNA, 23 bp, Homo sapiens
  source 1..23: mol_type = genomic DNA
gaagcacgaatataaaacaaagg

SEQ ID NO: 4886 - DNA, 23 bp, Homo sapiens
  source 1..23: mol_type = genomic DNA
taggaataagtaattctgatggg

SEQ ID NO: 4887 - DNA, 23 bp, Homo sapiens
  source 1..23: mol_type = genomic DNA
ctgactgacataataactgcagg

SEQ ID NO: 4888 - DNA, 23 bp, Homo sapiens
  source 1..23: mol_type = genomic DNA
ctatctcgtaaataagagctggg

SEQ ID NO: 4889 - DNA, 23 bp, Homo sapiens
  source 1..23: mol_type = genomic DNA
atcatagattctttgctaagggg

SEQ ID NO: 4890 - DNA, 23 bp, Homo sapiens
  source 1..23: mol_type = genomic DNA
attatacacagaaaagctgcagg

SEQ ID NO: 4891 - DNA, 23 bp, Homo sapiens
  source 1..23: mol_type = genomic DNA
attgttatatcatttgacatcgg

SEQ ID NO: 4892 - DNA, 23 bp, Homo sapiens
  source 1..23: mol_type = genomic DNA
gtgtgtacatatatgggtggtgg

SEQ ID NO: 4893 - DNA, 23 bp, Homo sapiens
  source 1..23: mol_type = genomic DNA
gcttggctagggttgtattgggg

SEQ ID NO: 4894 - DNA, 23 bp, Homo sapiens
  source 1..23: mol_type = genomic DNA
aaggaactggcacttttcagtgg

SEQ ID NO: 4895 - DNA, 23 bp, Homo sapiens
  source 1..23: mol_type = genomic DNA
ttctgatgaccctagatccaggg

SEQ ID NO: 4896 - DNA, 23 bp, Homo sapiens
  source 1..23: mol_type = genomic DNA
aacttgatttccattaacgatgg

SEQ ID NO: 4897 - DNA, 23 bp, Homo sapiens
  source 1..23: mol_type = genomic DNA
caggagcagagccttgagatggg

SEQ ID NO: 4898 - DNA, 23 bp, Homo sapiens
  source 1..23: mol_type = genomic DNA
tttattttcagataaagcacagg

SEQ ID NO: 4899 - DNA, 23 bp, Homo sapiens
  source 1..23: mol_type = genomic DNA
aaaaagctagtaaatggaagggg

SEQ ID NO: 4900 - DNA, 23 bp, Homo sapiens
  source 1..23: mol_type = genomic DNA
gatccttgcacaaacaagccagg

SEQ ID NO: 4901 - DNA, 23 bp, Homo sapiens
  source 1..23: mol_type = genomic DNA
tggttttgtctgggaatcggtgg

SEQ ID NO: 4902 - DNA, 23 bp, Homo sapiens
  source 1..23: mol_type = genomic DNA
ctatagagtaagttgcaggcagg

SEQ ID NO: 4903 - DNA, 23 bp, Homo sapiens
  source 1..23: mol_type = genomic DNA
aaatactgaaagatgtagatggg

SEQ ID NO: 4904 - DNA, 23 bp, Homo sapiens
  source 1..23: mol_type = genomic DNA
cttttaacctgaaaatccaaagg

SEQ ID NO: 4905 - DNA, 23 bp, Homo sapiens
  source 1..23: mol_type = genomic DNA
attcagtgtcaggacaaagatgg

SEQ ID NO: 4906 - DNA, 23 bp, Homo sapiens
  source 1..23: mol_type = genomic DNA
agtgtctccagtgccagagaggg

SEQ ID NO: 4907 - DNA, 23 bp, Homo sapiens
  source 1..23: mol_type = genomic DNA
ttggtcttgcaaagggtcaaggg

SEQ ID NO: 4908 - DNA, 23 bp, Homo sapiens
  source 1..23: mol_type = genomic DNA
ctaggctgaaggatgatagtggg

SEQ ID NO: 4909 - DNA, 23 bp, Homo sapiens
  source 1..23: mol_type = genomic DNA
gatgacttcccagtaggtggagg

SEQ ID NO: 4910 - DNA, 23 bp, Homo sapiens
  source 1..23: mol_type = genomic DNA
ataaaacttgttgaatcactcgg

SEQ ID NO: 4911 - DNA, 23 bp, Homo sapiens
  source 1..23: mol_type = genomic DNA
atattttctcactctttcagagg

SEQ ID NO: 4912 - DNA, 23 bp, Homo sapiens
  source 1..23: mol_type = genomic DNA
caaagtggtaatttgccagtagg

SEQ ID NO: 4913 - DNA, 23 bp, Homo sapiens
  source 1..23: mol_type = genomic DNA
agaggaggcgaggtagaggaagg

SEQ ID NO: 4914 - DNA, 23 bp, Homo sapiens
  source 1..23: mol_type = genomic DNA
cactgcctttcagtacctacggg

SEQ ID NO: 4915 - DNA, 23 bp, Homo sapiens
  source 1..23: mol_type = genomic DNA
ccattttagtgatttctggaagg

SEQ ID NO: 4916 - DNA, 23 bp, Homo sapiens
  source 1..23: mol_type = genomic DNA
attgctagtccccacttacaagg

SEQ ID NO: 4917 - DNA, 23 bp, Homo sapiens
  source 1..23: mol_type = genomic DNA
ggaaattcaagaagggatgacgg

SEQ ID NO: 4918 - DNA, 23 bp, Homo sapiens
  source 1..23: mol_type = genomic DNA
acaactatgaaaaagagcattgg

SEQ ID NO: 4919 - DNA, 23 bp, Homo sapiens
  source 1..23: mol_type = genomic DNA
agtgtccttacactattcgaagg

SEQ ID NO: 4920 - DNA, 23 bp, Homo sapiens
  source 1..23: mol_type = genomic DNA
atgaaaagagtggtgaggtaggg

SEQ ID NO: 4921 - DNA, 23 bp, Homo sapiens
  source 1..23: mol_type = genomic DNA
tgtttactatcccaaagttgggg

SEQ ID NO: 4922 - DNA, 23 bp, Homo sapiens
  source 1..23: mol_type = genomic DNA
ccatatcagaaaataaatgaagg

SEQ ID NO: 4923 - DNA, 23 bp, Homo sapiens
  source 1..23: mol_type = genomic DNA
aataaataaaaagtaaacctagg

SEQ ID NO: 4924 - DNA, 23 bp, Homo sapiens
  source 1..23: mol_type = genomic DNA
gttaaaatcagtcacttcagagg

SEQ ID NO: 4925 - DNA, 23 bp, Homo sapiens
  source 1..23: mol_type = genomic DNA
ctgcatgtagatccttatgtggg

SEQ ID NO: 4926 - DNA, 23 bp, Homo sapiens
  source 1..23: mol_type = genomic DNA
ttcatcactatcatagagatggg

SEQ ID NO: 4927 - DNA, 23 bp, Homo sapiens
  source 1..23: mol_type = genomic DNA
tgcttgtgtaattaactccatgg

SEQ ID NO: 4928 - DNA, 23 bp, Homo sapiens
  source 1..23: mol_type = genomic DNA
cattattcagatcattgcaaagg

SEQ ID NO: 4929 - DNA, 23 bp, Homo sapiens
  source 1..23: mol_type = genomic DNA
tgtccaggtgaaagaaatgccgg

SEQ ID NO: 4930 - DNA, 23 bp, Homo sapiens
  source 1..23: mol_type = genomic DNA
aatctctttcccttcaagagagg

SEQ ID NO: 4931 - DNA, 23 bp, Homo sapiens
  source 1..23: mol_type = genomic DNA
ccaattatagctatctagctcgg

SEQ ID NO: 4932 - DNA, 23 bp, Homo sapiens
  source 1..23: mol_type = genomic DNA
tgcttgtgatcaagaatggatgg

SEQ ID NO: 4933 - DNA, 23 bp, Homo sapiens
  source 1..23: mol_type = genomic DNA
ttctggctgtgagaggcataggg

SEQ ID NO: 4934 - DNA, 23 bp, Homo sapiens
  source 1..23: mol_type = genomic DNA
gattttgtttagaagtagcaagg

SEQ ID NO: 4935 - DNA, 23 bp, Homo sapiens
  source 1..23: mol_type = genomic DNA
tttggtagagataggcagtaggg

SEQ ID NO: 4936 - DNA, 23 bp, Homo sapiens
  source 1..23: mol_type = genomic DNA
gaaaatgtgttacagtaaggagg

SEQ ID NO: 4937 - DNA, 23 bp, Homo sapiens
  source 1..23: mol_type = genomic DNA
tgatttgaagaagaatatggagg

SEQ ID NO: 4938 - DNA, 23 bp, Homo sapiens
  source 1..23: mol_type = genomic DNA
tgcaaaagtaaagaaaaagtggg

SEQ ID NO: 4939 - DNA, 23 bp, Homo sapiens
  source 1..23: mol_type = genomic DNA
cttaaaatattgaaatagcgagg

SEQ ID NO: 4940 - DNA, 23 bp, Homo sapiens
  source 1..23: mol_type = genomic DNA
gctaaaatatatgtgactgtagg

SEQ ID NO: 4941 - DNA, 23 bp, Homo sapiens
  source 1..23: mol_type = genomic DNA
gtttccttaaagccctctgaggg

SEQ ID NO: 4942 - DNA, 23 bp, Homo sapiens
  source 1..23: mol_type = genomic DNA
gtgtgatccatggggtaggatgg

SEQ ID NO: 4943 - DNA, 23 bp, Homo sapiens
  source 1..23: mol_type = genomic DNA
agaggtttgagattcacaaaagg

SEQ ID NO: 4944 - DNA, 23 bp, Homo sapiens
  source 1..23: mol_type = genomic DNA
cgtaattgtttcccttgaggggg

SEQ ID NO: 4945 - DNA, 23 bp, Homo sapiens
  source 1..23: mol_type = genomic DNA
cagtgttaggaaattcaagaagg

SEQ ID NO: 4946 - DNA, 23 bp, Homo sapiens
  source 1..23: mol_type = genomic DNA
tcttcatcaacagtttggaaagg

SEQ ID NO: 4947 - DNA, 23 bp, Homo sapiens
  source 1..23: mol_type = genomic DNA
tgtcaccaccaacgatgactggg

SEQ ID NO: 4948 - DNA, 23 bp, Homo sapiens
  source 1..23: mol_type = genomic DNA
taccacccagggaatacagcagg

SEQ ID NO: 4949 - DNA, 23 bp, Homo sapiens
  source 1..23: mol_type = genomic DNA
ttgttactagaactaaaatgagg

SEQ ID NO: 4950 - DNA, 23 bp, Homo sapiens
  source 1..23: mol_type = genomic DNA
tcaaatcaaaaaacgtagaacgg

SEQ ID NO: 4951 - DNA, 23 bp, Homo sapiens
  source 1..23: mol_type = genomic DNA
ataaagacaatatttcctatggg

SEQ ID NO: 4952 - DNA, 23 bp, Homo sapiens
  source 1..23: mol_type = genomic DNA
caatctagatagtatttccgtgg

SEQ ID NO: 4953 - DNA, 23 bp, Homo sapiens
  source 1..23: mol_type = genomic DNA
tttgagattggatctcctagtgg

SEQ ID NO: 4954 - DNA, 23 bp, Homo sapiens
  source 1..23: mol_type = genomic DNA
catgtatcattagggagtagagg

SEQ ID NO: 4955 - DNA, 23 bp, Homo sapiens
  source 1..23: mol_type = genomic DNA
aaacaatctaaaacttgcaatgg

SEQ ID NO: 4956 - DNA, 23 bp, Homo sapiens
  source 1..23: mol_type = genomic DNA
ctaaaactggtgaatgcagatgg

SEQ ID NO: 4957 - DNA, 23 bp, Homo sapiens
  source 1..23: mol_type = genomic DNA
ggacttctaacttaagacaatgg

SEQ ID NO: 4958 - DNA, 23 bp, Homo sapiens
  source 1..23: mol_type = genomic DNA
ttttaggaacttctgggctgggg

SEQ ID NO: 4959 - DNA, 23 bp, Homo sapiens
  source 1..23: mol_type = genomic DNA
gtaatccactgaaggaactcagg

SEQ ID NO: 4960 - DNA, 23 bp, Homo sapiens
  source 1..23: mol_type = genomic DNA
attacatagaagcattagaaagg

SEQ ID NO: 4961 - DNA, 23 bp, Homo sapiens
  source 1..23: mol_type = genomic DNA
gataaggactctgaaatgcaagg

SEQ ID NO: 4962 - DNA, 23 bp, Homo sapiens
  source 1..23: mol_type = genomic DNA
tccccatacttaagatcaagtgg

SEQ ID NO: 4963 - DNA, 23 bp, Homo sapiens
  source 1..23: mol_type = genomic DNA
agatgtttattttaggactgtgg

SEQ ID NO: 4964 - DNA, 23 bp, Homo sapiens
  source 1..23: mol_type = genomic DNA
cattaaatgtaaataatccgtgg

SEQ ID NO: 4965 - DNA, 23 bp, Homo sapiens
  source 1..23: mol_type = genomic DNA
caccaaatacaggcagtcacagg

SEQ ID NO: 4966 - DNA, 23 bp, Homo sapiens
  source 1..23: mol_type = genomic DNA
tataaaggaaatgggttcagtgg

SEQ ID NO: 4967 - DNA, 23 bp, Homo sapiens
  source 1..23: mol_type = genomic DNA
tctaaagaagatggatcaccagg

SEQ ID NO: 4968 - DNA, 23 bp, Homo sapiens
  source 1..23: mol_type = genomic DNA
ttggatttcatgccatggcaagg

SEQ ID NO: 4969 - DNA, 23 bp, Homo sapiens
  source 1..23: mol_type = genomic DNA
gttctattttggagagaaggagg

SEQ ID NO: 4970 - DNA, 23 bp, Homo sapiens
  source 1..23: mol_type = genomic DNA
tatggccatataaatttcaaagg

SEQ ID NO: 4971 - DNA, 23 bp, Homo sapiens
  source 1..23: mol_type = genomic DNA
ctaagctccctctggaatggagg

SEQ ID NO: 4972 - DNA, 23 bp, Homo sapiens
  source 1..23: mol_type = genomic DNA
aagaactcttgggccagtgtagg

SEQ ID NO: 4973 - DNA, 23 bp, Homo sapiens
  source 1..23: mol_type = genomic DNA
ataggtttggtggacaaactagg

SEQ ID NO: 4974 - DNA, 23 bp, Homo sapiens
  source 1..23: mol_type = genomic DNA
tagacagaggtttccctccacgg

SEQ ID NO: 4975 - DNA, 23 bp, Homo sapiens
  source 1..23: mol_type = genomic DNA
tgttactccatagtcaatgatgg

SEQ ID NO: 4976 - DNA, 23 bp, Homo sapiens
  source 1..23: mol_type = genomic DNA
gcatgagcttcatactcacttgg

SEQ ID NO: 4977 - DNA, 23 bp, Homo sapiens
  source 1..23: mol_type = genomic DNA
gtttctgaactagcagtgcccgg

SEQ ID NO: 4978 - DNA, 23 bp, Homo sapiens
  source 1..23: mol_type = genomic DNA
ggagatggttttgagtactcagg

SEQ ID NO: 4979 - DNA, 23 bp, Homo sapiens
  source 1..23: mol_type = genomic DNA
tcttacactagtacccttcaggg

SEQ ID NO: 4980 - DNA, 23 bp, Homo sapiens
  source 1..23: mol_type = genomic DNA
tgctacagaagtataaatgatgg

SEQ ID NO: 4981 - DNA, 23 bp, Homo sapiens
  source 1..23: mol_type = genomic DNA
aataccttccgtcattccaatgg

SEQ ID NO: 4982 - DNA, 23 bp, Homo sapiens
  source 1..23: mol_type = genomic DNA
cctactgttaagacacaggatgg

SEQ ID NO: 4983 - DNA, 23 bp, Homo sapiens
  source 1..23: mol_type = genomic DNA
aattctacagtaactggggttgg

SEQ ID NO: 4984 - DNA, 23 bp, Homo sapiens
  source 1..23: mol_type = genomic DNA
atgattagaatagggaacctagg

SEQ ID NO: 4985 - DNA, 23 bp, Homo sapiens
  source 1..23: mol_type = genomic DNA
cttaacaccccgttgaccaaagg

SEQ ID NO: 4986 - DNA, 23 bp, Homo sapiens
  source 1..23: mol_type = genomic DNA
gatatttgaaacaacaagcaagg

SEQ ID NO: 4987 - DNA, 23 bp, Homo sapiens
  source 1..23: mol_type = genomic DNA
attgtaacctaaactgcctgtgg

SEQ ID NO: 4988 - DNA, 23 bp, Homo sapiens
  source 1..23: mol_type = genomic DNA
attttgctcctggccaaaggagg

SEQ ID NO: 4989 - DNA, 23 bp, Homo sapiens
  source 1..23: mol_type = genomic DNA
ggccctttcatatctctgtacgg

SEQ ID NO: 4990 - DNA, 23 bp, Homo sapiens
  source 1..23: mol_type = genomic DNA
attgcagtgaaagaaatttgcgg

SEQ ID NO: 4991 - DNA, 23 bp, Homo sapiens
  source 1..23: mol_type = genomic DNA
aggtgtgatctaaccagcatagg

SEQ ID NO: 4992 - DNA, 23 bp, Homo sapiens
  source 1..23: mol_type = genomic DNA
ttattacaagtcactctttgggg

SEQ ID NO: 4993 - DNA, 23 bp, Homo sapiens
  source 1..23: mol_type = genomic DNA
tgactgtaggaatcctctgttgg

SEQ ID NO: 4994 - DNA, 23 bp, Homo sapiens
  source 1..23: mol_type = genomic DNA
tccctcttgattacacccctagg

SEQ ID NO: 4995 - DNA, 23 bp, Homo sapiens
  source 1..23: mol_type = genomic DNA
gtatttccgtgggggtaatgagg

SEQ ID NO: 4996 - DNA, 23 bp, Homo sapiens
  source 1..23: mol_type = genomic DNA
gctggggaaatgtggcctgaagg

SEQ ID NO: 4997 - DNA, 23 bp, Homo sapiens
  source 1..23: mol_type = genomic DNA
ttcttacagctccttcacattgg

SEQ ID NO: 4998 - DNA, 23 bp, Homo sapiens
  source 1..23: mol_type = genomic DNA
gcttactttagagcagtcacagg

SEQ ID NO: 4999 - DNA, 23 bp, Homo sapiens
  source 1..23: mol_type = genomic DNA
ctatatgcagaatcgtgtatggg

SEQ ID NO: 5000 - DNA, 23 bp, Homo sapiens
  source 1..23: mol_type = genomic DNA
tttgatgttatgtacttaggagg

SEQ ID NO: 5001 - DNA, 23 bp, Homo sapiens
  source 1..23: mol_type = genomic DNA
attaggaatgcaatatatggagg

SEQ ID NO: 5002 - DNA, 23 bp, Homo sapiens
  source 1..23: mol_type = genomic DNA
tgtccctgatgctggaaaagtgg

SEQ ID NO: 5003 - DNA, 23 bp, Homo sapiens
  source 1..23: mol_type = genomic DNA
aatttgtgtttcaaaaaactggg

SEQ ID NO: 5004 - DNA, 23 bp, Homo sapiens
  source 1..23: mol_type = genomic DNA
gaataggatggtttgtaaagggg

SEQ ID NO: 5005 - DNA, 23 bp, Homo sapiens
  source 1..23: mol_type = genomic DNA
tgaagatctaaagtgaagccagg

SEQ ID NO: 5006 - DNA, 23 bp, Homo sapiens
  source 1..23: mol_type = genomic DNA
ctgtaggtcctcaggacacatgg

SEQ ID NO: 5007 - DNA, 23 bp, Homo sapiens
  source 1..23: mol_type = genomic DNA
gcatgaactggccatgaacatgg

SEQ ID NO: 5008 - DNA, 23 bp, Homo sapiens
  source 1..23: mol_type = genomic DNA
aagaggtaggtcattcagccagg

SEQ ID NO: 5009 - DNA, 23 bp, Homo sapiens
  source 1..23: mol_type = genomic DNA
tcttcgatctacaaggtctacgg

SEQ ID NO: 5010 - DNA, 23 bp, Homo sapiens
  source 1..23: mol_type = genomic DNA
tcttatgcctagatgtacatagg

SEQ ID NO: 5011 - DNA, 23 bp, Homo sapiens
  source 1..23: mol_type = genomic DNA
ggaaaggccagtctattgacagg

SEQ ID NO: 5012 - DNA, 23 bp, Homo sapiens
  source 1..23: mol_type = genomic DNA
ttattgtttgctccatacaaagg

SEQ ID NO: 5013 - DNA, 23 bp, Homo sapiens
  source 1..23: mol_type = genomic DNA
cagaagttcctaaaatcttgtgg

SEQ ID NO: 5014 - DNA, 23 bp, Homo sapiens
  source 1..23: mol_type = genomic DNA
acttttagtgtcaacaaagaggg

SEQ ID NO: 5015 - DNA, 23 bp, Homo sapiens
  source 1..23: mol_type = genomic DNA
ttatatgttttgttacaagtagg

SEQ ID NO: 5016 - DNA, 23 bp, Homo sapiens
  source 1..23: mol_type = genomic DNA
gtgaaaagtaatacttcctaggg

SEQ ID NO: 5017 - DNA, 23 bp, Homo sapiens
  source 1..23: mol_type = genomic DNA
gggcattttgtgcaatgctgagg

SEQ ID NO: 5018 - DNA, 23 bp, Homo sapiens
  source 1..23: mol_type = genomic DNA
ataaacgtatttttcccttgagg

SEQ ID NO: 5019 - DNA, 23 bp, Homo sapiens
  source 1..23: mol_type = genomic DNA
catgtagtctctaaaggcacagg

SEQ ID NO: 5020 - DNA, 23 bp, Homo sapiens
  source 1..23: mol_type = genomic DNA
tgcgagttacacacatcgactgg

SEQ ID NO: 5021 - DNA, 23 bp, Homo sapiens
  source 1..23: mol_type = genomic DNA
caactacaccgaatctcacatgg

SEQ ID NO: 5022 - DNA, 23 bp, Homo sapiens
  source 1..23: mol_type = genomic DNA
acaccccatcaacaataaagtgg

SEQ ID NO: 5023 - DNA, 23 bp, Homo sapiens
  source 1..23: mol_type = genomic DNA
cagtagttgtggcaacctatggg

SEQ ID NO: 5024 - DNA, 23 bp, Homo sapiens
  source 1..23: mol_type = genomic DNA
ataaatgcagtaaaaagcctagg

SEQ ID NO: 5025 - DNA, 23 bp, Homo sapiens
  source 1..23: mol_type = genomic DNA
gtgatcattcatttaaacctcgg

SEQ ID NO: 5026 - DNA, 23 bp, Homo sapiens
  source 1..23: mol_type = genomic DNA
catctttgaaaaattcaagaggg

SEQ ID NO: 5027 - DNA, 23 bp, Homo sapiens
  source 1..23: mol_type = genomic DNA
ttcttcctgattacatccagtgg

SEQ ID NO: 5028 - DNA, 23 bp, Homo sapiens
  source 1..23: mol_type = genomic DNA
atggatttgaaaggacaagaggg

SEQ ID NO: 5029 - DNA, 23 bp, Homo sapiens
  source 1..23: mol_type = genomic DNA
tctagacatataattttaagggg

SEQ ID NO: 5030 - DNA, 23 bp, Homo sapiens
  source 1..23: mol_type = genomic DNA
tttccatttgaatatcccacagg

SEQ ID NO: 5031 - DNA, 23 bp, Homo sapiens
  source 1..23: mol_type = genomic DNA
ctaaaagacacactactgatggg

SEQ ID NO: 5032 - DNA, 23 bp, Homo sapiens
  source 1..23: mol_type = genomic DNA
attgcaggttggaggagggtggg

SEQ ID NO: 5033 - DNA, 23 bp, Homo sapiens
  source 1..23: mol_type = genomic DNA
tgccttttccaggttttctgagg

SEQ ID NO: 5034 - DNA, 23 bp, Homo sapiens
  source 1..23: mol_type = genomic DNA
aattaatctgccgaagatgacgg

SEQ ID NO: 5035 - DNA, 23 bp, Homo sapiens
  source 1..23: mol_type = genomic DNA
ggcacacactggaatggcaccgg

SEQ ID NO: 5036 - DNA, 23 bp, Homo sapiens
  source 1..23: mol_type = genomic DNA
actggaagagatatacaagatgg

SEQ ID NO: 5037 - DNA, 23 bp, Homo sapiens
  source 1..23: mol_type = genomic DNA
tttaaaatattctgtagccaagg

SEQ ID NO: 5038 - DNA, 23 bp, Homo sapiens
  source 1..23: mol_type = genomic DNA
ttgctcggacagagtctgtaggg

SEQ ID NO: 5039 - DNA, 23 bp, Homo sapiens
  source 1..23: mol_type = genomic DNA
gactggggatacaatgtggatgg

SEQ ID NO: 5040 - DNA, 23 bp, Homo sapiens
  source 1..23: mol_type = genomic DNA
aagtctcccacacatgatgcagg

SEQ ID NO: 5041 - DNA, 23 bp, Homo sapiens
  source 1..23: mol_type = genomic DNA
atagccagtgatggaaatgaagg

SEQ ID NO: 5042 - DNA, 23 bp, Homo sapiens
  source 1..23: mol_type = genomic DNA
tagtaaggatggataaggagtgg

SEQ ID NO: 5043 - DNA, 23 bp, Homo sapiens
  source 1..23: mol_type = genomic DNA
tattagacacaaaaattggaagg

SEQ ID NO: 5044 - DNA, 23 bp, Homo sapiens
  source 1..23: mol_type = genomic DNA
cctccaagcatatcaagtacagg

SEQ ID NO: 5045 - DNA, 23 bp, Homo sapiens
  source 1..23: mol_type = genomic DNA
ggaattttctttagctggcaggg

SEQ ID NO: 5046 - DNA, 23 bp, Homo sapiens
  source 1..23: mol_type = genomic DNA
tattttcaatgattttccatggg

SEQ ID NO: 5047 - DNA, 23 bp, Homo sapiens
  source 1..23: mol_type = genomic DNA
caaactatgacgcgagaggatgg

SEQ ID NO: 5048 - DNA, 23 bp, Homo sapiens
  source 1..23: mol_type = genomic DNA
gtaggtagtatgttatcctcagg

SEQ ID NO: 5049 - DNA, 23 bp, Homo sapiens
  source 1..23: mol_type = genomic DNA
tgacgcttcttgcaggcagaagg

SEQ ID NO: 5050 - DNA, 23 bp, Homo sapiens
  source 1..23: mol_type = genomic DNA
gtttactgaaaggcatacctagg

SEQ ID NO: 5051 - DNA, 23 bp, Homo sapiens
  source 1..23: mol_type = genomic DNA
ccctcttgattacacccctaggg

SEQ ID NO: 5052 - DNA, 23 bp, Homo sapiens
  source 1..23: mol_type = genomic DNA
ccagttaccataaaaagacatgg

SEQ ID NO: 5053 - DNA, 23 bp, Homo sapiens
  source 1..23: mol_type = genomic DNA
ttttacctgagttccttcagtgg

SEQ ID NO: 5054 - DNA, 23 bp, Homo sapiens
  source 1..23: mol_type = genomic DNA
tagagatataataagtggaaggg

SEQ ID NO: 5055 - DNA, 23 bp, Homo sapiens
  source 1..23: mol_type = genomic DNA
tcagacactcccattccaatggg

SEQ ID NO: 5056 - DNA, 23 bp, Homo sapiens
  source 1..23: mol_type = genomic DNA
tgaaaaggatgcgggaaaggtgg

SEQ ID NO: 5057 - DNA, 23 bp, Homo sapiens
  source 1..23: mol_type = genomic DNA
aattagaattgtctttcagaggg

SEQ ID NO: 5058 - DNA, 23 bp, Homo sapiens
  source 1..23: mol_type = genomic DNA
ctcaataccatggtaggaggagg

SEQ ID NO: 5059 - DNA, 23 bp, Homo sapiens
  source 1..23: mol_type = genomic DNA
catctcttaactacagtgccagg

SEQ ID NO: 5060 - DNA, 23 bp, Homo sapiens
  source 1..23: mol_type = genomic DNA
gccaccacaacagagaaggttgg

SEQ ID NO: 5061 - DNA, 23 bp, Homo sapiens
  source 1..23: mol_type = genomic DNA
ttattttgtaaagctacggaagg

SEQ ID NO: 5062 - DNA, 23 bp, Homo sapiens
  source 1..23: mol_type = genomic DNA
gtttcctgaaccaggaacatagg

SEQ ID NO: 5063 - DNA, 23 bp, Homo sapiens
  source 1..23: mol_type = genomic DNA
aacaatatataaatagaggatgg

SEQ ID NO: 5064 - DNA, 23 bp, Homo sapiens
  source 1..23: mol_type = genomic DNA
ttctaccctgctacttgtagagg

SEQ ID NO: 5065 - DNA, 23 bp, Homo sapiens
  source 1..23: mol_type = genomic DNA
acctgatttattcaaagaggagg

SEQ ID NO: 5066 - DNA, 23 bp, Homo sapiens
  source 1..23: mol_type = genomic DNA
attaaaataaccaatcctctagg

SEQ ID NO: 5067 - DNA, 23 bp, Homo sapiens
  source 1..23: mol_type = genomic DNA
gcaacctatgggattaagtaggg

SEQ ID NO: 5068 - DNA, 23 bp, Homo sapiens
  source 1..23: mol_type = genomic DNA
tcatagcataccaattaagcagg

SEQ ID NO: 5069 - DNA, 23 bp, Homo sapiens
  source 1..23: mol_type = genomic DNA
ttataggaagaaagttatgaagg

SEQ ID NO: 5070 - DNA, 23 bp, Homo sapiens
  source 1..23: mol_type = genomic DNA
gtcagacactcccattccaatgg

SEQ ID NO: 5071 - DNA, 23 bp, Homo sapiens
  source 1..23: mol_type = genomic DNA
caaagtttatatgtgatccaagg

SEQ ID NO: 5072 - DNA, 23 bp, Homo sapiens
  source 1..23: mol_type = genomic DNA
acagcccactcctagcccatggg

SEQ ID NO: 5073 - DNA, 23 bp, Homo sapiens
  source 1..23: mol_type = genomic DNA
cgtagctttacaaaataacaagg

SEQ ID NO: 5074 - DNA, 23 bp, Homo sapiens
  source 1..23: mol_type = genomic DNA
gaccgtacagagatatgaaaggg

SEQ ID NO: 5075 - DNA, 23 bp, Homo sapiens
  source 1..23: mol_type = genomic DNA
ggactgcaaagcactcaagcagg

SEQ ID NO: 5076 - DNA, 23 bp, Homo sapiens
  source 1..23: mol_type = genomic DNA
aagcttacggcaaggatgcaggg

SEQ ID NO: 5077 - DNA, 23 bp, Homo sapiens
  source 1..23: mol_type = genomic DNA
atattgtgatttaagggcgtagg

SEQ ID NO: 5078 - DNA, 23 bp, Homo sapiens
  source 1..23: mol_type = genomic DNA
ccaataaatcaacctacagtagg

SEQ ID NO: 5079 - DNA, 23 bp, Homo sapiens
  source 1..23: mol_type = genomic DNA
ttttcaactggtagttggggagg

SEQ ID NO: 5080 - DNA, 23 bp, Homo sapiens
  source 1..23: mol_type = genomic DNA
agcctactaaagagaatgaaagg

SEQ ID NO: 5081 - DNA, 23 bp, Homo sapiens
  source 1..23: mol_type = genomic DNA
tattgccacggaagaaggctggg

SEQ ID NO: 5082 - DNA, 23 bp, Homo sapiens
  source 1..23: mol_type = genomic DNA
cgagttacagttaaattggtggg

SEQ ID NO: 5083 - DNA, 23 bp, Homo sapiens
  source 1..23: mol_type = genomic DNA
caatatttaagaaaaaacttagg

SEQ ID NO: 5084 - DNA, 23 bp, Homo sapiens
  source 1..23: mol_type = genomic DNA
taacaacaattagttaaaagcgg

SEQ ID NO: 5085 - DNA, 23 bp, Homo sapiens
  source 1..23: mol_type = genomic DNA
tcaccagagatagaaatatgagg

SEQ ID NO: 5086 - DNA, 23 bp, Homo sapiens
  source 1..23: mol_type = genomic DNA
taacatatcaataaattacatgg

SEQ ID NO: 5087 - DNA, 23 bp, Homo sapiens
  source 1..23: mol_type = genomic DNA
tattaatccatccctggcatagg

SEQ ID NO: 5088 - DNA, 23 bp, Homo sapiens
  source 1..23: mol_type = genomic DNA
atagctttagttttcaaaagggg

SEQ ID NO: 5089 - DNA, 23 bp, Homo sapiens
  source 1..23: mol_type = genomic DNA
aagcacgaatataaaacaaaggg

SEQ ID NO: 5090 - DNA, 23 bp, Homo sapiens
  source 1..23: mol_type = genomic DNA
caccaacttatctattgcaaggg

SEQ ID NO: 5091 - DNA, 23 bp, Homo sapiens
  source 1..23: mol_type = genomic DNA
catctatctctttaggaccaggg

SEQ ID NO: 5092 - DNA, 23 bp, Homo sapiens
  source 1..23: mol_type = genomic DNA
tcctccttctctcttactggggg

SEQ ID NO: 5093 - DNA, 23 bp, Homo sapiens
  source 1..23: mol_type = genomic DNA
attaaatgtaaataatccgtggg

SEQ ID NO: 5094 - DNA, 23 bp, Homo sapiens
  source 1..23: mol_type = genomic DNA
gtggtgataaacagcattggagg

SEQ ID NO: 5095 - DNA, 23 bp, Homo sapiens
  source 1..23: mol_type = genomic DNA
gctgttgagtgacagttaagtgg

SEQ ID NO: 5096 - DNA, 23 bp, Homo sapiens
  source 1..23: mol_type = genomic DNA
ccaaggaacaaggtccctatggg

SEQ ID NO: 5097 - DNA, 23 bp, Homo sapiens
  source 1..23: mol_type = genomic DNA
gactggatcccagtcatcgttgg

SEQ ID NO: 5098 - DNA, 23 bp, Homo sapiens
  source 1..23: mol_type = genomic DNA
cattttaaaactcttagtggtgg

SEQ ID NO: 5099 - DNA, 23 bp, Homo sapiens
  source 1..23: mol_type = genomic DNA
tgatagataaatgtaaagctggg

SEQ ID NO: 5100 - DNA, 23 bp, Homo sapiens
  source 1..23: mol_type = genomic DNA
gtctagatttggagagacaaggg

SEQ ID NO: 5101 - DNA, 23 bp, Homo sapiens
  source 1..23: mol_type = genomic DNA
agtagaaaaattcttcccatggg

SEQ ID NO: 5102 - DNA, 23 bp, Homo sapiens
  source 1..23: mol_type = genomic DNA
agggtactctttaaatctagtgg

SEQ ID NO: 5103 - DNA, 23 bp, Homo sapiens
  source 1..23: mol_type = genomic DNA
gaagactacaagccatatgatgg

SEQ ID NO: 5104 - DNA, 23 bp, Homo sapiens
  source 1..23: mol_type = genomic DNA
tatttttcatctttatgcgatgg

SEQ ID NO: 5105 - DNA, 23 bp, Homo sapiens
  source 1..23: mol_type = genomic DNA
tggtgaactctggtcttccatgg

SEQ ID NO: 5106 - DNA, 23 bp, Homo sapiens
  source 1..23: mol_type = genomic DNA
agtgagaacgaggatgagggagg

SEQ ID NO: 5107 - DNA, 23 bp, Homo sapiens
  source 1..23: mol_type = genomic DNA
gtagctgatagaggtgagaaagg

SEQ ID NO: 5108 - DNA, 23 bp, Homo sapiens
  source 1..23: mol_type = genomic DNA
agatggattttaccttgccatgg

SEQ ID NO: 5109 - DNA, 23 bp, Homo sapiens
  source 1..23: mol_type = genomic DNA
acttggtcacactatataagtgg

SEQ ID NO: 5110 - DNA, 23 bp, Homo sapiens
  source 1..23: mol_type = genomic DNA
aatctgttaaatagaaacatagg

SEQ ID NO: 5111 - DNA, 23 bp, Homo sapiens
  source 1..23: mol_type = genomic DNA
aatttgctgtgataaacagtggg

SEQ ID NO: 5112 - DNA, 23 bp, Homo sapiens
  source 1..23: mol_type = genomic DNA
aaagtaaacttaaaattaggagg

SEQ ID NO: 5113 - DNA, 23 bp, Homo sapiens
  source 1..23: mol_type = genomic DNA
tggaccctacttaatcccatagg

SEQ ID NO: 5114 - DNA, 23 bp, Homo sapiens
  source 1..23: mol_type = genomic DNA
agagcagtgtgtaaaaggattgg

SEQ ID NO: 5115 - DNA, 23 bp, Homo sapiens
  source 1..23: mol_type = genomic DNA
tgtccttatagcttcttggtggg

SEQ ID NO: 5116 - DNA, 23 bp, Homo sapiens
  source 1..23: mol_type = genomic DNA
aaatcagtctaaatactgccagg

SEQ ID NO: 5117 - DNA, 23 bp, Homo sapiens
  source 1..23: mol_type = genomic DNA
ggatggataaggagtgggagtgg

SEQ ID NO: 5118 - DNA, 23 bp, Homo sapiens
  source 1..23: mol_type = genomic DNA
gcctagtcccaatttctggtggg

SEQ ID NO: 5119 - DNA, 23 bp, Homo sapiens
  source 1..23: mol_type = genomic DNA
gtttagctcgctagctaacaggg

SEQ ID NO: 5120 - DNA, 23 bp, Homo sapiens
  source 1..23: mol_type = genomic DNA
ttgtactatgaaggatacttggg

SEQ ID NO: 5121 - DNA, 23 bp, Homo sapiens
  source 1..23: mol_type = genomic DNA
tacagaataagaaagcactaggg

SEQ ID NO: 5122 - DNA, 23 bp, Homo sapiens
  source 1..23: mol_type = genomic DNA
ccacaattaagaaaagatgatgg

SEQ ID NO: 5123 - DNA, 23 bp, Homo sapiens
  source 1..23: mol_type = genomic DNA
agttacaatgagttcttcaaggg

SEQ ID NO: 5124 - DNA, 23 bp, Homo sapiens
  source 1..23: mol_type = genomic DNA
gcactgcctttcagtacctacgg

SEQ ID NO: 5125 - DNA, 23 bp, Homo sapiens
  source 1..23: mol_type = genomic DNA
tactagatattactcactcaggg

SEQ ID NO: 5126 - DNA, 23 bp, Homo sapiens
  source 1..23: mol_type = genomic DNA
ctgctttgctcaaatgtcagggg

SEQ ID NO: 5127 - DNA, 23 bp, Homo sapiens
  source 1..23: mol_type = genomic DNA
agtttgagctgcagcacccgtgg

SEQ ID NO: 5128 - DNA, 23 bp, Homo sapiens
  source 1..23: mol_type = genomic DNA
tagcacagatacaattaagcagg

SEQ ID NO: 5129 - DNA, 23 bp, Homo sapiens
  source 1..23: mol_type = genomic DNA
agagatagaaatatgaggcatgg

SEQ ID NO: 5130 - DNA, 23 bp, Homo sapiens
  source 1..23: mol_type = genomic DNA
tcccaaagttggggggacatggg

SEQ ID NO: 5131 - DNA, 23 bp, Homo sapiens
  source 1..23: mol_type = genomic DNA
gctgaagctgacgctgacacggg

SEQ ID NO: 5132 - DNA, 23 bp, Homo sapiens
  source 1..23: mol_type = genomic DNA
aaaaaaatgtcaacgaagcaggg

SEQ ID NO: 5133 - DNA, 23 bp, Homo sapiens
  source 1..23: mol_type = genomic DNA
tttgacaacgtgtctcaagaagg

SEQ ID NO: 5134 - DNA, 23 bp, Homo sapiens
  source 1..23: mol_type = genomic DNA
tttaaatttaaggttcaaagagg

SEQ ID NO: 5135 - DNA, 23 bp, Homo sapiens
  source 1..23: mol_type = genomic DNA
tccctgccagaacaagcaaaagg

SEQ ID NO: 5136 - DNA, 23 bp, Homo sapiens
  source 1..23: mol_type = genomic DNA
tcttggcaggaaacaattgatgg

SEQ ID NO: 5137 - DNA, 23 bp, Homo sapiens
  source 1..23: mol_type = genomic DNA
ttcctttatccagttatctgagg

SEQ ID NO: 5138 - DNA, 23 bp, Homo sapiens
  source 1..23: mol_type = genomic DNA
tcagaactaaagtttttgaaggg

SEQ ID NO: 5139 - DNA, 23 bp, Homo sapiens
  source 1..23: mol_type = genomic DNA
tgacatctgaatctatgaaaggg

SEQ ID NO: 5140 - DNA, 23 bp, Homo sapiens
  source 1..23: mol_type = genomic DNA
atgctcttgccagatttgtaggg

SEQ ID NO: 5141 - DNA, 23 bp, Homo sapiens
  source 1..23: mol_type = genomic DNA
ttaaaaggtacctacccataggg

SEQ ID NO: 5142 - DNA, 23 bp, Homo sapiens
  source 1..23: mol_type = genomic DNA
tctcatatagaagctattgtggg

SEQ ID NO: 5143 - DNA, 23 bp, Homo sapiens
  source 1..23: mol_type = genomic DNA
tgggagcaggttggagaagaggg

SEQ ID NO: 5144 - DNA, 23 bp, Homo sapiens
  source 1..23: mol_type = genomic DNA
gtatctctacttcgtctactggg

SEQ ID NO: 5145 - DNA, 23 bp, Homo sapiens
  source 1..23: mol_type = genomic DNA
ttaaatgaagatcacattggagg

SEQ ID NO: 5146 - DNA, 23 bp, Homo sapiens
  source 1..23: mol_type = genomic DNA
tatcctgtcacattacacttagg

SEQ ID NO: 5147 - DNA, 23 bp, Homo sapiens
  source 1..23: mol_type = genomic DNA
cctgtcagtattgaccccttggg

SEQ ID NO: 5148 - DNA, 23 bp, Homo sapiens
  source 1..23: mol_type = genomic DNA
atacagattaaagaaccaaaagg

SEQ ID NO: 5149 - DNA, 23 bp, Homo sapiens
  source 1..23: mol_type = genomic DNA
ggtgtatgttgaagatgaaaggg

SEQ ID NO: 5150 - DNA, 23 bp, Homo sapiens
  source 1..23: mol_type = genomic DNA
atatcccaaaacctccattacgg

SEQ ID NO: 5151 - DNA, 23 bp, Homo sapiens
  source 1..23: mol_type = genomic DNA
attgatgtacaagcccgaaaagg

SEQ ID NO: 5152 - DNA, 23 bp, Homo sapiens
  source 1..23: mol_type = genomic DNA
tgactggtatattccaagaatgg

SEQ ID NO: 5153 - DNA, 23 bp, Homo sapiens
  source 1..23: mol_type = genomic DNA
aggatatgcccctttatgatggg

SEQ ID NO: 5154 - DNA, 23 bp, Homo sapiens
  source 1..23: mol_type = genomic DNA
ggcttggtttgtggtcaagatgg

SEQ ID NO: 5155 - DNA, 23 bp, Homo sapiens
  source 1..23: mol_type = genomic DNA
tgtctagaaaagcttttgctcgg

SEQ ID NO: 5156 - DNA, 23 bp, Homo sapiens
  source 1..23: mol_type = genomic DNA
ttagagatataataagtggaagg

SEQ ID NO: 5157 - DNA, 23 bp, Homo sapiens
  source 1..23: mol_type = genomic DNA
gttgtctaaccttttggcaaggg

SEQ ID NO: 5158 - DNA, 23 bp, Homo sapiens
  source 1..23: mol_type = genomic DNA
atcaagtcggtacactcggatgg

SEQ ID NO: 5159 - DNA, 23 bp, Homo sapiens
  source 1..23: mol_type = genomic DNA
actgctctaaagtaagctaaagg

SEQ ID NO: 5160 - DNA, 23 bp, Homo sapiens
  source 1..23: mol_type = genomic DNA
ggttgtctaaccttttggcaagg

SEQ ID NO: 5161 - DNA, 23 bp, Homo sapiens
  source 1..23: mol_type = genomic DNA
ttagtaccatagttatactcagg

SEQ ID NO: 5162 - DNA, 23 bp, Homo sapiens
  source 1..23: mol_type = genomic DNA
tcatcttgagacaagagctcagg

SEQ ID NO: 5163 - DNA, 23 bp, Homo sapiens
  source 1..23: mol_type = genomic DNA
catttgtgaaggtgtttaagtgg

SEQ ID NO: 5164 - DNA, 23 bp, Homo sapiens
  source 1..23: mol_type = genomic DNA
tattatgtgtatagtatggatgg

SEQ ID NO: 5165 - DNA, 23 bp, Homo sapiens
  source 1..23: mol_type = genomic DNA
gccacgtgacacagaaatgaagg

SEQ ID NO: 5166 - DNA, 23 bp, Homo sapiens
  source 1..23: mol_type = genomic DNA
tcccacttgatcttaagtatggg

SEQ ID NO: 5167 - DNA, 23 bp, Homo sapiens
  source 1..23: mol_type = genomic DNA
agcagttgcaaagtaaagaatgg

SEQ ID NO: 5168 - DNA, 23 bp, Homo sapiens
  source 1..23: mol_type = genomic DNA
tgccatggctgtttgttagaggg

SEQ ID NO: 5169 - DNA, 23 bp, Homo sapiens
  source 1..23: mol_type = genomic DNA
atctagtgtttgattgaggacgg

SEQ ID NO: 5170 - DNA, 23 bp, Homo sapiens
  source 1..23: mol_type = genomic DNA
gcaaaaaattgaaaaggatgcgg

SEQ ID NO: 5171 - DNA, 23 bp, Homo sapiens
  source 1..23: mol_type = genomic DNA
attcaatcagtagataagcttgg

SEQ ID NO: 5172 - DNA, 23 bp, Homo sapiens
  source 1..23: mol_type = genomic DNA
gtagtttgacatgaccgtaatgg

SEQ ID NO: 5173 - DNA, 23 bp, Homo sapiens
  source 1..23: mol_type = genomic DNA
cttggcctatctcagggtacagg

SEQ ID NO: 5174 - DNA, 23 bp, Homo sapiens
  source 1..23: mol_type = genomic DNA
tattgtgatttaagggcgtaggg

SEQ ID NO: 5175 - DNA, 23 bp, Homo sapiens
  source 1..23: mol_type = genomic DNA
gagatagaaatatgaggcatggg

SEQ ID NO: 5176 - DNA, 23 bp, Homo sapiens
  source 1..23: mol_type = genomic DNA
aattgcatagcaatcaaaaaggg

SEQ ID NO: 5177 - DNA, 23 bp, Homo sapiens
  source 1..23: mol_type = genomic DNA
gaaaagaacagaatgtccttggg

SEQ ID NO: 5178 - DNA, 23 bp, Homo sapiens
  source 1..23: mol_type = genomic DNA
tttagctctgtgctaatgaaagg

SEQ ID NO: 5179 - DNA, 23 bp, Homo sapiens
  source 1..23: mol_type = genomic DNA
tcaaatatggtcctgcacacagg

SEQ ID NO: 5180 - DNA, 23 bp, Homo sapiens
  source 1..23: mol_type = genomic DNA
cagacttcaactttctaccctgg

SEQ ID NO: 5181 - DNA, 23 bp, Homo sapiens
  source 1..23: mol_type = genomic DNA
agaagacttataaaagaccttgg

SEQ ID NO: 5182 - DNA, 23 bp, Homo sapiens
  source 1..23: mol_type = genomic DNA
ctaggaactggagaatatatggg

SEQ ID NO: 5183 - DNA, 23 bp, Homo sapiens
  source 1..23: mol_type = genomic DNA
taagaagaggtgtagtagagagg

SEQ ID NO: 5184 - DNA, 23 bp, Homo sapiens
  source 1..23: mol_type = genomic DNA
caaggcagctatatagcaaaggg

SEQ ID NO: 5185 - DNA, 23 bp, Homo sapiens
  source 1..23: mol_type = genomic DNA
ttctagatcagctttaacaatgg

SEQ ID NO: 5186 - DNA, 23 bp, Homo sapiens
  source 1..23: mol_type = genomic DNA
acacacacctccacacatatggg

SEQ ID NO: 5187 - DNA, 23 bp, Homo sapiens
  source 1..23: mol_type = genomic DNA
tgaaactgtaacagttgtaaggg

SEQ ID NO: 5188 - DNA, 23 bp, Homo sapiens
  source 1..23: mol_type = genomic DNA
aaagtttgtctaggatgccatgg

SEQ ID NO: 5189 - DNA, 23 bp, Homo sapiens
  source 1..23: mol_type = genomic DNA
caccatgtctttgttgcaggtgg

SEQ ID NO: 5190 - DNA, 23 bp, Homo sapiens
  source 1..23: mol_type = genomic DNA
ataggaataagtaattctgatgg

SEQ ID NO: 5191 - DNA, 23 bp, Homo sapiens
  source 1..23: mol_type = genomic DNA
ctataatagagcccttcggcagg

SEQ ID NO: 5192 - DNA, 23 bp, Homo sapiens
  source 1..23: mol_type = genomic DNA
attagacgagcaaaaggaagagg

SEQ ID NO: 5193 - DNA, 23 bp, Homo sapiens
  source 1..23: mol_type = genomic DNA
ggatactcctatgccagggatgg

SEQ ID NO: 5194 - DNA, 23 bp, Homo sapiens
  source 1..23: mol_type = genomic DNA
tgagtcctggatttttaatgtgg

SEQ ID NO: 5195 - DNA, 23 bp, Homo sapiens
  source 1..23: mol_type = genomic DNA
tctttgtcagttcccactatcgg

SEQ ID NO: 5196 - DNA, 23 bp, Homo sapiens
  source 1..23: mol_type = genomic DNA
gataaatcgaataagttggtagg

SEQ ID NO: 5197 - DNA, 23 bp, Homo sapiens
  source 1..23: mol_type = genomic DNA
tctaatgtatttgaaaaatgtgg

SEQ ID NO: 5198 - DNA, 23 bp, Homo sapiens
  source 1..23: mol_type = genomic DNA
cagaatagcccagtcaaaagagg

SEQ ID NO: 5199 - DNA, 23 bp, Homo sapiens
  source 1..23: mol_type = genomic DNA
aagtaattaaaatctgaatgtgg

SEQ ID NO: 5200 - DNA, 23 bp, Homo sapiens
  source 1..23: mol_type = genomic DNA
catgttaaattaaggtttagggg

SEQ ID NO: 5201 - DNA, 23 bp, Homo sapiens
  source 1..23: mol_type = genomic DNA
gttcaaaaagaaacacagatagg

SEQ ID NO: 5202 - DNA, 23 bp, Homo sapiens
  source 1..23: mol_type = genomic DNA
tctagaatctaaataaggctagg

SEQ ID NO: 5203 - DNA, 23 bp, Homo sapiens
  source 1..23: mol_type = genomic DNA
atatgcaagctaaatatgcttgg

SEQ ID NO: 5204 - DNA, 23 bp, Homo sapiens
  source 1..23: mol_type = genomic DNA
aatatgcttgtgatcaagaatgg

SEQ ID NO: 5205 - DNA, 23 bp, Homo sapiens
  source 1..23: mol_type = genomic DNA
ctgacaactccaaggctggatgg

SEQ ID NO: 5206 - DNA, 23 bp, Homo sapiens
  source 1..23: mol_type = genomic DNA
cgacttggttctaaagaagatgg

SEQ ID NO: 5207 - DNA, 23 bp, Homo sapiens
  source 1..23: mol_type = genomic DNA
gcttcctcaaacacagggaaagg

SEQ ID NO: 5208 - DNA, 23 bp, Homo sapiens
  source 1..23: mol_type = genomic DNA
gtaggccaagccaaatcaatcgg

SEQ ID NO: 5209 - DNA, 23 bp, Homo sapiens
  source 1..23: mol_type = genomic DNA
agttacagtccagttacttgagg

SEQ ID NO: 5210 - DNA, 23 bp, Homo sapiens
  source 1..23: mol_type = genomic DNA
gggtcaaccaaagtgtataaagg

SEQ ID NO: 5211 - DNA, 23 bp, Homo sapiens
  source 1..23: mol_type = genomic DNA
ggaacccaaggaaatcagaaagg

SEQ ID NO: 5212 - DNA, 23 bp, Homo sapiens
  source 1..23: mol_type = genomic DNA
taatgtggacatatatgttgcgg

SEQ ID NO: 5213 - DNA, 23 bp, Homo sapiens
  source 1..23: mol_type = genomic DNA
ccatcctgtgtcttaacagtagg

SEQ ID NO: 5214 - DNA, 23 bp, Homo sapiens
  source 1..23: mol_type = genomic DNA
ctcacagtagttttaccccatgg

SEQ ID NO: 5215 - DNA, 23 bp, Homo sapiens
  source 1..23: mol_type = genomic DNA
aacattattaccaaaaccatcgg

SEQ ID NO: 5216 - DNA, 23 bp, Homo sapiens
  source 1..23: mol_type = genomic DNA
agttatagctgacctttactggg

SEQ ID NO: 5217 - DNA, 23 bp, Homo sapiens
  source 1..23: mol_type = genomic DNA
ccaaaagaaacacatttcaatgg

SEQ ID NO: 5218 - DNA, 23 bp, Homo sapiens
  source 1..23: mol_type = genomic DNA
catttagtaacaataaatgttgg

SEQ ID NO: 5219 - DNA, 23 bp, Homo sapiens
  source 1..23: mol_type = genomic DNA
ataagattacctttctggtaggg

SEQ ID NO: 5220 - DNA, 23 bp, Homo sapiens
  source 1..23: mol_type = genomic DNA
tacagaatctaaagattgaaggg

SEQ ID NO: 5221 - DNA, 23 bp, Homo sapiens
  source 1..23: mol_type = genomic DNA
gtaaagctagacggatcaaaagg

SEQ ID NO: 5222 - DNA, 23 bp, Homo sapiens
  source 1..23: mol_type = genomic DNA
gtataaatcctgatactagctgg

SEQ ID NO: 5223 - DNA, 23 bp, Homo sapiens
  source 1..23: mol_type = genomic DNA
aattgcaatgaaatgtatgtagg

SEQ ID NO: 5224 - DNA, 23 bp, Homo sapiens
  source 1..23: mol_type = genomic DNA
gcacagattagtgtcacctatgg

SEQ ID NO: 5225 - DNA, 23 bp, Homo sapiens
  source 1..23: mol_type = genomic DNA
ttttagcacacctggtgcagagg

SEQ ID NO: 5226 - DNA, 23 bp, Homo sapiens
  source 1..23: mol_type = genomic DNA
gcccaaatcatcaaagcagatgg

SEQ ID NO: 5227 - DNA, 23 bp, Homo sapiens
  source 1..23: mol_type = genomic DNA
tacttggaatggatgagcaaagg

SEQ ID NO: 5228 - DNA, 23 bp, Homo sapiens
  source 1..23: mol_type = genomic DNA
tggggttactaaacattcaaagg

SEQ ID NO: 5229 - DNA, 23 bp, Homo sapiens
  source 1..23: mol_type = genomic DNA
aaaatccacccaccccactaggg

SEQ ID NO: 5230 - DNA, 23 bp, Homo sapiens
  source 1..23: mol_type = genomic DNA
accacatcagaccgtgggaacgg

SEQ ID NO: 5231 - DNA, 23 bp, Homo sapiens
  source 1..23: mol_type = genomic DNA
attagacctctatttgtgctagg

SEQ ID NO: 5232 - DNA, 23 bp, Homo sapiens
  source 1..23: mol_type = genomic DNA
ttagatctaatttgtataggggg

SEQ ID NO: 5233 - DNA, 23 bp, Homo sapiens
  source 1..23: mol_type = genomic DNA
ccattgtgtttcccatcccaagg

SEQ ID NO: 5234 - DNA, 23 bp, Homo sapiens
  source 1..23: mol_type = genomic DNA
aagtatctctcataggtccttgg

SEQ ID NO: 5235 - DNA, 23 bp, Homo sapiens
  source 1..23: mol_type = genomic DNA
gttttgtcttaaatttctggagg

SEQ ID NO: 5236 - DNA, 23 bp, Homo sapiens
  source 1..23: mol_type = genomic DNA
ttactgacgcgtcccccaaacgg

SEQ ID NO: 5237 - DNA, 23 bp, Homo sapiens
  source 1..23: mol_type = genomic DNA
ttttaacctgaaaatccaaaggg

SEQ ID NO: 5238 - DNA, 23 bp, Homo sapiens
  source 1..23: mol_type = genomic DNA
tgctgttctccccaaagcagggg

SEQ ID NO: 5239 - DNA, 23 bp, Homo sapiens
  source 1..23: mol_type = genomic DNA
tttttataataaaagctgtaggg

SEQ ID NO: 5240 - DNA, 23 bp, Homo sapiens
  source 1..23: mol_type = genomic DNA
tcaagttgttatatgtaagtggg

SEQ ID NO: 5241 - DNA, 23 bp, Homo sapiens
  source 1..23: mol_type = genomic DNA
aaagattgcaggttggaggaggg

SEQ ID NO: 5242 - DNA, 23 bp, Homo sapiens
  source 1..23: mol_type = genomic DNA
gctttttcaactggtagttgggg

SEQ ID NO: 5243 - DNA, 23 bp, Homo sapiens
  source 1..23: mol_type = genomic DNA
cttgcttaaggaaaactggatgg

SEQ ID NO: 5244 - DNA, 23 bp, Homo sapiens
  source 1..23: mol_type = genomic DNA
ctgcctcctattataccctaggg

SEQ ID NO: 5245 - DNA, 23 bp, Homo sapiens
  source 1..23: mol_type = genomic DNA
cagacaactgagtaaccaaatgg

SEQ ID NO: 5246 - DNA, 23 bp, Homo sapiens
  source 1..23: mol_type = genomic DNA
tttatgatggattaagggtgtgg

SEQ ID NO: 5247 - DNA, 23 bp, Homo sapiens
  source 1..23: mol_type = genomic DNA
caatgtctgtgaattgcccaggg

SEQ ID NO: 5248 - DNA, 23 bp, Homo sapiens
  source 1..23: mol_type = genomic DNA
ggggtatgcatgggagcagaagg

SEQ ID NO: 5249 - DNA, 23 bp, Homo sapiens
  source 1..23: mol_type = genomic DNA
aatgtaatttttgctaagtgcgg

SEQ ID NO: 5250 - DNA, 23 bp, Homo sapiens
  source 1..23: mol_type = genomic DNA
ttatttcctgcattagtcaaggg

SEQ ID NO: 5251 - DNA, 23 bp, Homo sapiens
  source 1..23: mol_type = genomic DNA
ctaagaagagactgagtgctggg

SEQ ID NO: 5252 - DNA, 23 bp, Homo sapiens
  source 1..23: mol_type = genomic DNA
aatctaggcaagctgctacaagg

SEQ ID NO: 5253 - DNA, 23 bp, Homo sapiens
  source 1..23: mol_type = genomic DNA
ataatttctcaattaccctacgg

SEQ ID NO: 5254 - DNA, 23 bp, Homo sapiens
  source 1..23: mol_type = genomic DNA
atttaaagttaattttatagggg

SEQ ID NO: 5255 - DNA, 23 bp, Homo sapiens
  source 1..23: mol_type = genomic DNA
gagcccagaacatctctttgtgg

SEQ ID NO: 5256 - DNA, 23 bp, Homo sapiens
  source 1..23: mol_type = genomic DNA
aggtagggtggggaaaaagtggg

SEQ ID NO: 5257 - DNA, 23 bp, Homo sapiens
  source 1..23: mol_type = genomic DNA
aacatttacccataacgtaaagg

SEQ ID NO: 5258 - DNA, 23 bp, Homo sapiens
  source 1..23: mol_type = genomic DNA
catgtgcatttgcaagaccttgg

SEQ ID NO: 5259 - DNA, 23 bp, Homo sapiens
  source 1..23: mol_type = genomic DNA
ttaaccacccaaagctgcttagg

SEQ ID NO: 5260 - DNA, 23 bp, Homo sapiens
  source 1..23: mol_type = genomic DNA
acaggagcagagccttgagatgg

SEQ ID NO: 5261 - DNA, 23 bp, Homo sapiens
  source 1..23: mol_type = genomic DNA
cagtgccaggatttgaaggcggg

SEQ ID NO: 5262 - DNA, 23 bp, Homo sapiens
  source 1..23: mol_type = genomic DNA
acttagtctcagagtgggagtgg

SEQ ID NO: 5263 - DNA, 23 bp, Homo sapiens
  source 1..23: mol_type = genomic DNA
atattagtgtgaatgtatgtggg

SEQ ID NO: 5264 - DNA, 23 bp, Homo sapiens
  source 1..23: mol_type = genomic DNA
atcatcttgcagatacagacagg

SEQ ID NO: 5265 - DNA, 23 bp, Homo sapiens
  source 1..23: mol_type = genomic DNA
caagtaatctggactatcacagg

SEQ ID NO: 5266 - DNA, 23 bp, Homo sapiens
  source 1..23: mol_type = genomic DNA
tgaaatgtatgtaggtagggtgg

SEQ ID NO: 5267 - DNA, 23 bp, Homo sapiens
  source 1..23: mol_type = genomic DNA
gtatctgactaccagtttcaggg

SEQ ID NO: 5268 - DNA, 23 bp, Homo sapiens
  source 1..23: mol_type = genomic DNA
gccttgaagaaaggtgttggtgg

SEQ ID NO: 5269 - DNA, 23 bp, Homo sapiens
  source 1..23: mol_type = genomic DNA
atcgtgtatggggagagtacagg

SEQ ID NO: 5270 - DNA, 23 bp, Homo sapiens
  source 1..23: mol_type = genomic DNA
ttgacaacttacttattgtgtgg

SEQ ID NO: 5271 - DNA, 23 bp, Homo sapiens
  source 1..23: mol_type = genomic DNA
acataatgcaaaatgagcactgg

SEQ ID NO: 5272 - DNA, 23 bp, Homo sapiens
  source 1..23: mol_type = genomic DNA
ttccctttattaagccggcatgg

SEQ ID NO: 5273 - DNA, 23 bp, Homo sapiens
  source 1..23: mol_type = genomic DNA
gggtgaagaaaggagagtcgtgg

SEQ ID NO: 5274 - DNA, 23 bp, Homo sapiens
  source 1..23: mol_type = genomic DNA
gtgaagccaggtagtaaggatgg

SEQ ID NO: 5275 - DNA, 23 bp, Homo sapiens
  source 1..23: mol_type = genomic DNA
gcaatgaaatgtatgtaggtagg

SEQ ID NO: 5276 - DNA, 23 bp, Homo sapiens
  source 1..23: mol_type = genomic DNA
tgagaatctatattctacatagg

SEQ ID NO: 5277 - DNA, 23 bp, Homo sapiens
  source 1..23: mol_type = genomic DNA
agtgctcaatgggtttttggagg

SEQ ID NO: 5278 - DNA, 23 bp, Homo sapiens
  source 1..23: mol_type = genomic DNA
tcaaattcaaataacgacatagg

SEQ ID NO: 5279 - DNA, 23 bp, Homo sapiens
  source 1..23: mol_type = genomic DNA
cagaatgttcaattttatagggg

SEQ ID NO: 5280 - DNA, 23 bp, Homo sapiens
  source 1..23: mol_type = genomic DNA
aatactttccaaaaaacgtcagg

SEQ ID NO: 5281 - DNA, 23 bp, Homo sapiens
  source 1..23: mol_type = genomic DNA
agtttccgtactcccctagtggg

SEQ ID NO: 5282 - DNA, 23 bp, Homo sapiens
  source 1..23: mol_type = genomic DNA
ggctggggaagaatgatttgagg

SEQ ID NO: 5283 - DNA, 23 bp, Homo sapiens
  source 1..23: mol_type = genomic DNA
aaggttatagcagtgtaggctgg

SEQ ID NO: 5284 - DNA, 23 bp, Homo sapiens
  source 1..23: mol_type = genomic DNA
tgagagacttaaaattaggtagg

SEQ ID NO: 5285 - DNA, 23 bp, Homo sapiens
  source 1..23: mol_type = genomic DNA
gggaaaaagtgggagaagaaggg

SEQ ID NO: 5286 - DNA, 23 bp, Homo sapiens
  source 1..23: mol_type = genomic DNA
accacagggctcttggacaaggg

SEQ ID NO: 5287 - DNA, 23 bp, Homo sapiens
  source 1..23: mol_type = genomic DNA
tagtgatgcccaatgagccttgg

SEQ ID NO: 5288 - DNA, 23 bp, Homo sapiens
  source 1..23: mol_type = genomic DNA
gatgtttatattctgacgaaggg

SEQ ID NO: 5289 - DNA, 23 bp, Homo sapiens
  source 1..23: mol_type = genomic DNA
agctagaaggtaactttaggagg

SEQ ID NO: 5290 - DNA, 23 bp, Homo sapiens
  source 1..23: mol_type = genomic DNA
gcttttagatagtaacaagatgg

SEQ ID NO: 5291 - DNA, 23 bp, Homo sapiens
  source 1..23: mol_type = genomic DNA
tatcttttggtttcaccaagtgg

SEQ ID NO: 5292 - DNA, 23 bp, Homo sapiens
  source 1..23: mol_type = genomic DNA
ccctgtagtatgaataccccagg

SEQ ID NO: 5293 - DNA, 23 bp, Homo sapiens
  source 1..23: mol_type = genomic DNA
ctccagtgatactttaacatggg

SEQ ID NO: 5294 - DNA, 23 bp, Homo sapiens
  source 1..23: mol_type = genomic DNA
gtgaggccagtttgctaaagggg

SEQ ID NO: 5295 - DNA, 23 bp, Homo sapiens
  source 1..23: mol_type = genomic DNA
tgttgaaaactatgtcccattgg

SEQ ID NO: 5296 - DNA, 23 bp, Homo sapiens
  source 1..23: mol_type = genomic DNA
atcagtggaaagcacttgaatgg

SEQ ID NO: 5297 - DNA, 23 bp, Homo sapiens
  source 1..23: mol_type = genomic DNA
cacgtggctatactgttcattgg

SEQ ID NO: 5298 - DNA, 23 bp, Homo sapiens
  source 1..23: mol_type = genomic DNA
agatagaattgagaagactatgg

SEQ ID NO: 5299 - DNA, 23 bp, Homo sapiens
  source 1..23: mol_type = genomic DNA
taaaggactcaaacttttcgcgg

SEQ ID NO: 5300 - DNA, 23 bp, Homo sapiens
  source 1..23: mol_type = genomic DNA
taaatgggagctttgccaaaggg

SEQ ID NO: 5301 - DNA, 23 bp, Homo sapiens
  source 1..23: mol_type = genomic DNA
tcaacataataggacagcccagg

SEQ ID NO: 5302 - DNA, 23 bp, Homo sapiens
  source 1..23: mol_type = genomic DNA
agtttatctttccagtaagaggg

SEQ ID NO: 5303 - DNA, 23 bp, Homo sapiens
  source 1..23: mol_type = genomic DNA
ttacattctccatccagtccagg

SEQ ID NO: 5304 - DNA, 23 bp, Homo sapiens
  source 1..23: mol_type = genomic DNA
ctttctgctaactttttgaaagg

SEQ ID NO: 5305 - DNA, 23 bp, Homo sapiens
  source 1..23: mol_type = genomic DNA
ctttgatgtgtcacgtccagagg

SEQ ID NO: 5306 - DNA, 23 bp, Homo sapiens
  source 1..23: mol_type = genomic DNA
ggatgtcgaaccactctgactgg

SEQ ID NO: 5307 - DNA, 23 bp, Homo sapiens
  source 1..23: mol_type = genomic DNA
actgtattctgtaattgctaggg

SEQ ID NO: 5308 - DNA, 23 bp, Homo sapiens
  source 1..23: mol_type = genomic DNA
gcatctatctctttaggaccagg

SEQ ID NO: 5309 - DNA, 23 bp, Homo sapiens
  source 1..23: mol_type = genomic DNA
aatttcatcctattctgtatggg

SEQ ID NO: 5310 - DNA, 23 bp, Homo sapiens
  source 1..23: mol_type = genomic DNA
gatatgccatcctattaagtagg

SEQ ID NO: 5311 - DNA, 23 bp, Homo sapiens
  source 1..23: mol_type = genomic DNA
tcatgtacaattcatcccatagg

SEQ ID NO: 5312 - DNA, 23 bp, Homo sapiens
  source 1..23: mol_type = genomic DNA
tggtaatgtgtttataagagagg

SEQ ID NO: 5313 - DNA, 23 bp, Homo sapiens
  source 1..23: mol_type = genomic DNA
aattcactgtgtgtgatccatgg

SEQ ID NO: 5314 - DNA, 23 bp, Homo sapiens
  source 1..23: mol_type = genomic DNA
ctgaaatgtctctctagcactgg

SEQ ID NO: 5315 - DNA, 23 bp, Homo sapiens
  source 1..23: mol_type = genomic DNA
atcattagcgtagctgatagagg

SEQ ID NO: 5316 - DNA, 23 bp, Homo sapiens
  source 1..23: mol_type = genomic DNA
tcgtcctctcagatgccaaaagg

SEQ ID NO: 5317 - DNA, 23 bp, Homo sapiens
  source 1..23: mol_type = genomic DNA
ccctcctacctaaaactatgagg

SEQ ID NO: 5318 - DNA, 23 bp, Homo sapiens
  source 1..23: mol_type = genomic DNA
gcacactctttatggtgaaaggg

SEQ ID NO: 5319 - DNA, 23 bp, Homo sapiens
  source 1..23: mol_type = genomic DNA
gatccattttcaaattccatggg

SEQ ID NO: 5320 - DNA, 23 bp, Homo sapiens
  source 1..23: mol_type = genomic DNA
aattaacttcaatagggctgtgg

SEQ ID NO: 5321 - DNA, 23 bp, Homo sapiens
  source 1..23: mol_type = genomic DNA
cttcctcaaacacagggaaaggg

SEQ ID NO: 5322 - DNA, 23 bp, Homo sapiens
  source 1..23: mol_type = genomic DNA
ccgtaattgtttcccttgagggg

SEQ ID NO: 5323 - DNA, 23 bp, Homo sapiens
  source 1..23: mol_type = genomic DNA
ctcaatcccctcatatacagagg

SEQ ID NO: 5324 - DNA, 23 bp, Homo sapiens
  source 1..23: mol_type = genomic DNA
ataaacactttcatttatcaggg

SEQ ID NO: 5325 - DNA, 23 bp, Homo sapiens
  source 1..23: mol_type = genomic DNA
gacctaataatttcatgcgctgg

SEQ ID NO: 5326 - DNA, 23 bp, Homo sapiens
  source 1..23: mol_type = genomic DNA
aataagattacctttctggtagg

SEQ ID NO: 5327 - DNA, 23 bp, Homo sapiens
  source 1..23: mol_type = genomic DNA
gtaagcttcgacctcagccttgg

SEQ ID NO: 5328 - DNA, 23 bp, Homo sapiens
  source 1..23: mol_type = genomic DNA
gtacttgaaatgttactgtcagg

SEQ ID NO: 5329 - DNA, 23 bp, Homo sapiens
  source 1..23: mol_type = genomic DNA
tgtgtgacgtttttgtaaagtgg

SEQ ID NO: 5330 - DNA, 23 bp, Homo sapiens
  source 1..23: mol_type = genomic DNA
gtgaaaaccctcaaaagaaaggg

SEQ ID NO: 5331 - DNA, 23 bp, Homo sapiens
  source 1..23: mol_type = genomic DNA
gtattatccatttgcagtagagg

SEQ ID NO: 5332 - DNA, 23 bp, Homo sapiens
  source 1..23: mol_type = genomic DNA
tgaatcattctaattggtgaggg

SEQ ID NO: 5333 - DNA, 23 bp, Homo sapiens
  source 1..23: mol_type = genomic DNA
gcctctacagccatttaagtagg

SEQ ID NO: 5334 - DNA, 23 bp, Homo sapiens
  source 1..23: mol_type = genomic DNA
agaacctgatttattcaaagagg

SEQ ID NO: 5335 - DNA, 23 bp, Homo sapiens
  source 1..23: mol_type = genomic DNA
ttagaaatatgaagaaatcaggg

SEQ ID NO: 5336 - DNA, 23 bp, Homo sapiens
  source 1..23: mol_type = genomic DNA
acattatatgcataagacatagg

SEQ ID NO: 5337 - DNA, 23 bp, Homo sapiens
  source 1..23: mol_type = genomic DNA
atgtaaataatccgtgggggtgg

SEQ ID NO: 5338 - DNA, 23 bp, Homo sapiens
  source 1..23: mol_type = genomic DNA
ttgacatctgaatctatgaaagg

SEQ ID NO: 5339 - DNA, 23 bp, Homo sapiens
  source 1..23: mol_type = genomic DNA
atgctcagagtggatctgatagg

SEQ ID NO: 5340 - DNA, 23 bp, Homo sapiens
  source 1..23: mol_type = genomic DNA
gttgtgaattatactgccaatgg

SEQ ID NO: 5341 - DNA, 23 bp, Homo sapiens
  source 1..23: mol_type = genomic DNA
ctatgacgcgagaggatggcagg

SEQ ID NO: 5342 - DNA, 23 bp, Homo sapiens
  source 1..23: mol_type = genomic DNA
gatttggttctgcatcaggctgg

SEQ ID NO: 5343 - DNA, 23 bp, Homo sapiens
  source 1..23: mol_type = genomic DNA
ctagggcttaccttagaggcagg

SEQ ID NO: 5344 - DNA, 23 bp, Homo sapiens
  source 1..23: mol_type = genomic DNA
catgtacaattcatcccataggg

SEQ ID NO: 5345 - DNA, 23 bp, Homo sapiens
  source 1..23: mol_type = genomic DNA
tcatcctccctcataagtattgg

SEQ ID NO: 5346 - DNA, 23 bp, Homo sapiens
  source 1..23: mol_type = genomic DNA
tatttgattttaattggcaatgg

SEQ ID NO: 5347 - DNA, 23 bp, Homo sapiens
  source 1..23: mol_type = genomic DNA
ggcacatgttgcataaaactagg

SEQ ID NO: 5348 - DNA, 23 bp, Homo sapiens
  source 1..23: mol_type = genomic DNA
tcaactaagatagacacaaaggg

SEQ ID NO: 5349 - DNA, 23 bp, Homo sapiens
  source 1..23: mol_type = genomic DNA
acacaatcagatttatattgtgg

SEQ ID NO: 5350 - DNA, 23 bp, Homo sapiens
  source 1..23: mol_type = genomic DNA
cacagcattttctcaggcatggg

SEQ ID NO: 5351 - DNA, 23 bp, Homo sapiens
  source 1..23: mol_type = genomic DNA
cttctggctcccttccctcaggg

SEQ ID NO: 5352 - DNA, 23 bp, Homo sapiens
  source 1..23: mol_type = genomic DNA
tccccattttatcatgtgaaggg

SEQ ID NO: 5353 - DNA, 23 bp, Homo sapiens
  source 1..23: mol_type = genomic DNA
ttgcacttagtattataatgagg

SEQ ID NO: 5354 - DNA, 23 bp, Homo sapiens
  source 1..23: mol_type = genomic DNA
tctctggtgatgtcattgtaagg

SEQ ID NO: 5355 - DNA, 23 bp, Homo sapiens
  source 1..23: mol_type = genomic DNA
aaaggactcaaacttttcgcggg

SEQ ID NO: 5356 - DNA, 23 bp, Homo sapiens
  source 1..23: mol_type = genomic DNA
atagtgtacttcaattctgctgg

SEQ ID NO: 5357 - DNA, 23 bp, Homo sapiens
  source 1..23: mol_type = genomic DNA
aggctaatgtctattcaaatggg

SEQ ID NO: 5358 - DNA, 23 bp, Homo sapiens
  source 1..23: mol_type = genomic DNA
ggtaatttgccagtaggatgagg

SEQ ID NO: 5359 - DNA, 23 bp, Homo sapiens
  source 1..23: mol_type = genomic DNA
cattttggaggcaagagttgagg

SEQ ID NO: 5360 - DNA, 23 bp, Homo sapiens
  source 1..23: mol_type = genomic DNA
agtttaaaaatccaaacaatggg

SEQ ID NO: 5361 - DNA, 23 bp, Homo sapiens
  source 1..23: mol_type = genomic DNA
gttctgtagatgttctatagagg

SEQ ID NO: 5362 - DNA, 23 bp, Homo sapiens
  source 1..23: mol_type = genomic DNA
attagatgatgagacaaaatggg

SEQ ID NO: 5363 - DNA, 23 bp, Homo sapiens
  source 1..23: mol_type = genomic DNA
agtcagtgcttttagttttgggg

SEQ ID NO: 5364 - DNA, 23 bp, Homo sapiens
  source 1..23: mol_type = genomic DNA
gttacagtccagttacttgaggg

SEQ ID NO: 5365 - DNA, 23 bp, Homo sapiens
  source 1..23: mol_type = genomic DNA
ggttgcttttctgacagaaacgg

SEQ ID NO: 5366 - DNA, 23 bp, Homo sapiens
  source 1..23: mol_type = genomic DNA
ggaaactctgtaaagggagtagg

SEQ ID NO: 5367 - DNA, 23 bp, Homo sapiens
  source 1..23: mol_type = genomic DNA
actttgggccgaaaatttcaggg

SEQ ID NO: 5368 - DNA, 23 bp, Homo sapiens
  source 1..23: mol_type = genomic DNA
tgatttccaatcaggtaggcagg

SEQ ID NO: 5369 - DNA, 23 bp, Homo sapiens
  source 1..23: mol_type = genomic DNA
gttctcagtatgtgacctgctgg

SEQ ID NO: 5370 - DNA, 23 bp, Homo sapiens
  source 1..23: mol_type = genomic DNA
aaaaaatgtacataatacttggg

SEQ ID NO: 5371 - DNA, 23 bp, Homo sapiens
  source 1..23: mol_type = genomic DNA
cccagacaaaaccagaatagtgg

SEQ ID NO: 5372 - DNA, 23 bp, Homo sapiens
  source 1..23: mol_type = genomic DNA
ggaggaattggtctttcagaagg

SEQ ID NO: 5373 - DNA, 23 bp, Homo sapiens
  source 1..23: mol_type = genomic DNA
ttagaatccaagtttactcccgg

SEQ ID NO: 5374 - DNA, 23 bp, Homo sapiens
  source 1..23: mol_type = genomic DNA
attaaaatattaaatgggacagg

SEQ ID NO: 5375 - DNA, 23 bp, Homo sapiens
  source 1..23: mol_type = genomic DNA
tatcagatctgctggttacaggg

SEQ ID NO: 5376 - DNA, 23 bp, Homo sapiens
  source 1..23: mol_type = genomic DNA
gcatagtgaaactgatgccctgg

SEQ ID NO: 5377 - DNA, 23 bp, Homo sapiens
  source 1..23: mol_type = genomic DNA
tattctttaaagttccttggagg

SEQ ID NO: 5378 - DNA, 23 bp, Homo sapiens
  source 1..23: mol_type = genomic DNA
gagctagaagtttttatggatgg

SEQ ID NO: 5379 - DNA, 23 bp, Homo sapiens
  source 1..23: mol_type = genomic DNA
agttcttgctatcattaagaggg

SEQ ID NO: 5380 - DNA, 23 bp, Homo sapiens
  source 1..23: mol_type = genomic DNA
gttttccttctggctgtgagagg

SEQ ID NO: 5381 - DNA, 23 bp, Homo sapiens
  source 1..23: mol_type = genomic DNA
ggcaacctatgggattaagtagg

SEQ ID NO: 5382 - DNA, 23 bp, Homo sapiens
  source 1..23: mol_type = genomic DNA
aagagaaagattataagaagagg

SEQ ID NO: 5383 - DNA, 23 bp, Homo sapiens
  source 1..23: mol_type = genomic DNA
ttttgttcacatgtaggctgagg

SEQ ID NO: 5384 - DNA, 23 bp, Homo sapiens
  source 1..23: mol_type = genomic DNA
agatttgattcaactgtccatgg

SEQ ID NO: 5385 - DNA, 23 bp, Homo sapiens
  source 1..23: mol_type = genomic DNA
agccacagcacaacaaaaagagg

SEQ ID NO: 5386 - DNA, 23 bp, Homo sapiens
  source 1..23: mol_type = genomic DNA
tttcatgcccatcaaatatgagg

SEQ ID NO: 5387 - DNA, 23 bp, Homo sapiens
  source 1..23: mol_type = genomic DNA
gcccattcttcctaataggcagg

SEQ ID NO: 5388 - DNA, 23 bp, Homo sapiens
  source 1..23: mol_type = genomic DNA
tttctttaagaacagactgttgg

SEQ ID NO: 5389 - DNA, 23 bp, Homo sapiens
  source 1..23: mol_type = genomic DNA
gaggagggtgggtctatccaagg

SEQ ID NO: 5390 - DNA, 23 bp, Homo sapiens
  source 1..23: mol_type = genomic DNA
gttctcaatagcaaattgcttgg

SEQ ID NO: 5391 - DNA, 23 bp, Homo sapiens
  source 1..23: mol_type = genomic DNA
tttgttttctgtggttgaaaggg

SEQ ID NO: 5392 - DNA, 23 bp, Homo sapiens
  source 1..23: mol_type = genomic DNA
agcactgcctcagagcaattcgg

SEQ ID NO: 5393 - DNA, 23 bp, Homo sapiens
  source 1..23: mol_type = genomic DNA
gaatccaaagtatctctcatagg

SEQ ID NO: 5394 - DNA, 23 bp, Homo sapiens
  source 1..23: mol_type = genomic DNA
acagggacaagaccaagaacagg

SEQ ID NO: 5395 - DNA, 23 bp, Homo sapiens
  source 1..23: mol_type = genomic DNA
gctttgatcccatacagaatagg

SEQ ID NO: 5396 - DNA, 23 bp, Homo sapiens
  source 1..23: mol_type = genomic DNA
tgtgctgaagtctaagacaaagg

SEQ ID NO: 5397 - DNA, 23 bp, Homo sapiens
  source 1..23: mol_type = genomic DNA
gcctacactgctataaccttagg

SEQ ID NO: 5398 - DNA, 23 bp, Homo sapiens
  source 1..23: mol_type = genomic DNA
ataaaagttttaaaaagcaaagg

SEQ ID NO: 5399 - DNA, 23 bp, Homo sapiens
  source 1..23: mol_type = genomic DNA
gagcattcttgggcaccagctgg

SEQ ID NO: 5400 - DNA, 23 bp, Homo sapiens
  source 1..23: mol_type = genomic DNA
tattgatgtaaacgttatgcagg

SEQ ID NO: 5401 - DNA, 23 bp, Homo sapiens
  source 1..23: mol_type = genomic DNA
tttatcagacattttctcctggg

SEQ ID NO: 5402 - DNA, 23 bp, Homo sapiens
  source 1..23: mol_type = genomic DNA
gagcagcctgcacaagactttgg

SEQ ID NO: 5403 - DNA, 23 bp, Homo sapiens
  source 1..23: mol_type = genomic DNA
tgacatactctccagctgctagg

SEQ ID NO: 5404 - DNA, 23 bp, Homo sapiens
  source 1..23: mol_type = genomic DNA
agcaaaatgtcttaacactaggg

SEQ ID NO: 5405 - DNA, 23 bp, Homo sapiens
  source 1..23: mol_type = genomic DNA
ggtagtgttggctttataccagg

SEQ ID NO: 5406 - DNA, 23 bp, Homo sapiens
  source 1..23: mol_type = genomic DNA
atatattagcatatgttctaggg

SEQ ID NO: 5407 - DNA, 23 bp, Homo sapiens
  source 1..23: mol_type = genomic DNA
gggataataccctgagggaaggg

SEQ ID NO: 5408 - DNA, 23 bp, Homo sapiens
  source 1..23: mol_type = genomic DNA
agaactgcataggctttgtatgg

SEQ ID NO: 5409 - DNA, 23 bp, Homo sapiens
  source 1..23: mol_type = genomic DNA
aagcatttagaggggaagactgg

SEQ ID NO: 5410 - DNA, 23 bp, Homo sapiens
  source 1..23: mol_type = genomic DNA
gtgttctgcagcaggttaagtgg

SEQ ID NO: 5411 - DNA, 23 bp, Homo sapiens
  source 1..23: mol_type = genomic DNA
tgatccacatgatctggcctcgg

SEQ ID NO: 5412 - DNA, 23 bp, Homo sapiens
  source 1..23: mol_type = genomic DNA
tatgattcagtacctagctcagg

SEQ ID NO: 5413 - DNA, 23 bp, Homo sapiens
  source 1..23: mol_type = genomic DNA
taagtctttgacctttctaaggg

SEQ ID NO: 5414 - DNA, 23 bp, Homo sapiens
  source 1..23: mol_type = genomic DNA
ttcgactttggagaagcaaaggg

SEQ ID NO: 5415 - DNA, 23 bp, Homo sapiens
  source 1..23: mol_type = genomic DNA
gtttgagaagacatagggaatgg

SEQ ID NO: 5416 - DNA, 23 bp, Homo sapiens
  source 1..23: mol_type = genomic DNA
gatatttatatattcggctgagg

SEQ ID NO: 5417 - DNA, 23 bp, Homo sapiens
  source 1..23: mol_type = genomic DNA
attctcttaccttttgagaaggg

SEQ ID NO: 5418 - DNA, 23 bp, Homo sapiens
  source 1..23: mol_type = genomic DNA
gaattgtatctcttcagaaaggg

SEQ ID NO: 5419 - DNA, 23 bp, Homo sapiens
  source 1..23: mol_type = genomic DNA
atacttttgggtggagagagggg

SEQ ID NO: 5420 - DNA, 23 bp, Homo sapiens
  source 1..23: mol_type = genomic DNA
ataacactgttaacttacatggg

SEQ ID NO: 5421 - DNA, 23 bp, Homo sapiens
  source 1..23: mol_type = genomic DNA
tggaaattaaaatacagtaaagg

SEQ ID NO: 5422 - DNA, 23 bp, Homo sapiens
  source 1..23: mol_type = genomic DNA
cagaagaaaaagtttaactaggg

SEQ ID NO: 5423 - DNA, 23 bp, Homo sapiens
  source 1..23: mol_type = genomic DNA
tgacaagacctgtaaatgcccgg

SEQ ID NO: 5424 - DNA, 23 bp, Homo sapiens
  source 1..23: mol_type = genomic DNA
cctcatagttttaggtaggaggg

SEQ ID NO: 5425 - DNA, 23 bp, Homo sapiens
  source 1..23: mol_type = genomic DNA
gctagctgcaaggaataacttgg

SEQ ID NO: 5426 - DNA, 23 bp, Homo sapiens
  source 1..23: mol_type = genomic DNA
ccaatgctgtttatcaccacagg

SEQ ID NO: 5427 - DNA, 23 bp, Homo sapiens
  source 1..23: mol_type = genomic DNA
gtcctagtcttgcaaatgctagg

SEQ ID NO: 5428 - DNA, 23 bp, Homo sapiens
  source 1..23: mol_type = genomic DNA
aagtgccttttctattcagaagg

SEQ ID NO: 5429 - DNA, 23 bp, Homo sapiens
  source 1..23: mol_type = genomic DNA
taccataaaaaacttctaagtgg

SEQ ID NO: 5430 - DNA, 23 bp, Homo sapiens
  source 1..23: mol_type = genomic DNA
gaagtttgccaaataatacttgg

SEQ ID NO: 5431 - DNA, 23 bp, Homo sapiens
  source 1..23: mol_type = genomic DNA
ttaagacattattaaagtgtggg

SEQ ID NO: 5432 - DNA, 23 bp, Homo sapiens
  source 1..23: mol_type = genomic DNA
gcaaaagaccacaatctacctgg

SEQ ID NO: 5433 - DNA, 23 bp, Homo sapiens
  source 1..23: mol_type = genomic DNA
ctattgacttgcactcccacagg

SEQ ID NO: 5434 - DNA, 23 bp, Homo sapiens
  source 1..23: mol_type = genomic DNA
tctcccaatgagtgatatgatgg

SEQ ID NO: 5435 - DNA, 23 bp, Homo sapiens
  source 1..23: mol_type = genomic DNA
tttgaacctgaatcagatgatgg

SEQ ID NO: 5436 - DNA, 23 bp, Homo sapiens
  source 1..23: mol_type = genomic DNA
cttagcgacagttatgtccatgg

SEQ ID NO: 5437 - DNA, 23 bp, Homo sapiens
  source 1..23: mol_type = genomic DNA
atatatagcttccaagaatgagg

SEQ ID NO: 5438 - DNA, 23 bp, Homo sapiens
  source 1..23: mol_type = genomic DNA
cttacacttgccattggtcgggg

SEQ ID NO: 5439 - DNA, 23 bp, Homo sapiens
  source 1..23: mol_type = genomic DNA
attcgcaggtggtacttggttgg

SEQ ID NO: 5440 - DNA, 23 bp, Homo sapiens
  source 1..23: mol_type = genomic DNA
ttttataaccagttgacagatgg

SEQ ID NO: 5441 - DNA, 23 bp, Homo sapiens
  source 1..23: mol_type = genomic DNA
ctaaggttaatttcaacgaaagg

SEQ ID NO: 5442 - DNA, 23 bp, Homo sapiens
  source 1..23: mol_type = genomic DNA
acactatgagagaaataaaacgg

SEQ ID NO: 5443 - DNA, 23 bp, Homo sapiens
  source 1..23: mol_type = genomic DNA
ttttccccctagtttaaaagtgg

SEQ ID NO: 5444 - DNA, 23 bp, Homo sapiens
  source 1..23: mol_type = genomic DNA
gtgccccagctaggtgtacatgg

SEQ ID NO: 5445 - DNA, 23 bp, Homo sapiens
  source 1..23: mol_type = genomic DNA
gatcagttataacagacttaggg

SEQ ID NO: 5446 - DNA, 23 bp, Homo sapiens
  source 1..23: mol_type = genomic DNA
caggtaaagaaaacaatctaggg

SEQ ID NO: 5447 - DNA, 23 bp, Homo sapiens
  source 1..23: mol_type = genomic DNA
ctaacaagctagcaaaatcctgg

SEQ ID NO: 5448 - DNA, 23 bp, Homo sapiens
  source 1..23: mol_type = genomic DNA
ttacaaaatcagacccatagagg

SEQ ID NO: 5449 - DNA, 23 bp, Homo sapiens
  source 1..23: mol_type = genomic DNA
tgtattgccttatatacacctgg

SEQ ID NO: 5450 - DNA, 23 bp, Homo sapiens
  source 1..23: mol_type = genomic DNA
ttgattcagtttaagccacttgg

SEQ ID NO: 5451 - DNA, 23 bp, Homo sapiens
  source 1..23: mol_type = genomic DNA
agagactccactcttttgctagg

SEQ ID NO: 5452 - DNA, 23 bp, Homo sapiens
  source 1..23: mol_type = genomic DNA
aacattgataaattaaacattgg

SEQ ID NO: 5453 - DNA, 23 bp, Homo sapiens
  source 1..23: mol_type = genomic DNA
ataatccttacacttgccattgg

SEQ ID NO: 5454 - DNA, 23 bp, Homo sapiens
  source 1..23: mol_type = genomic DNA
atttcacttggcctatctcaggg

SEQ ID NO: 5455 - DNA, 23 bp, Homo sapiens
  source 1..23: mol_type = genomic DNA
accttttctaggataaagcttgg

SEQ ID NO: 5456 - DNA, 23 bp, Homo sapiens
  source 1..23: mol_type = genomic DNA
tagagctatttttaaagcagtgg

SEQ ID NO: 5457 - DNA, 23 bp, Homo sapiens
  source 1..23: mol_type = genomic DNA
gcaaagtgatctctgccagctgg

SEQ ID NO: 5458 - DNA, 23 bp, Homo sapiens
  source 1..23: mol_type = genomic DNA
tattagtttggcatccctgtggg

SEQ ID NO: 5459 - DNA, 23 bp, Homo sapiens
  source 1..23: mol_type = genomic DNA
aaaaaaatatctttcagccaggg

SEQ ID NO: 5460 - DNA, 23 bp, Homo sapiens
  source 1..23: mol_type = genomic DNA
catctgagaggacgacagctagg

SEQ ID NO: 5461 - DNA, 23 bp, Homo sapiens
  source 1..23: mol_type = genomic DNA
cattggtgctcaatatactaagg

SEQ ID NO: 5462 - DNA, 23 bp, Homo sapiens
  source 1..23: mol_type = genomic DNA
gcgaattggacaaaattcaatgg

SEQ ID NO: 5463 - DNA, 23 bp, Homo sapiens
  source 1..23: mol_type = genomic DNA
tatcattaagaggggacaaatgg

SEQ ID NO: 5464 - DNA, 23 bp, Homo sapiens
  source 1..23: mol_type = genomic DNA
aatgtaactaagcatttagaggg

SEQ ID NO: 5465 - DNA, 23 bp, Homo sapiens
  source 1..23: mol_type = genomic DNA
aatgggagtgtctgaccagctgg

SEQ ID NO: 5466 - DNA, 23 bp, Homo sapiens
  source 1..23: mol_type = genomic DNA
cttgagttaggtgtaaagaatgg

SEQ ID NO: 5467 - DNA, 23 bp, Homo sapiens
  source 1..23: mol_type = genomic DNA
cttcttccgtggcaatatgcagg

SEQ ID NO: 5468 - DNA, 23 bp, Homo sapiens
  source 1..23: mol_type = genomic DNA
gggcaactaattctgaaaacggg

SEQ ID NO: 5469 - DNA, 23 bp, Homo sapiens
  source 1..23: mol_type = genomic DNA
actcttgtgggtggcagtaaggg

SEQ ID NO: 5470 - DNA, 23 bp, Homo sapiens
  source 1..23: mol_type = genomic DNA
gcacacactcccttctcaaaagg

SEQ ID NO: 5471 - DNA, 23 bp, Homo sapiens
  source 1..23: mol_type = genomic DNA
aaagtagtagaaaacaatagtgg

SEQ ID NO: 5472 - DNA, 23 bp, Homo sapiens
  source 1..23: mol_type = genomic DNA
tcttttttgcaagattgcattgg

SEQ ID NO: 5473 - DNA, 23 bp, Homo sapiens
  source 1..23: mol_type = genomic DNA
cctgtacttgatatgcttggagg

SEQ ID NO: 5474 - DNA, 23 bp, Homo sapiens
  source 1..23: mol_type = genomic DNA
actaaggatttttcaatgcaggg

SEQ ID NO: 5475 - DNA, 23 bp, Homo sapiens
  source 1..23: mol_type = genomic DNA
cctgcctcctattataccctagg

SEQ ID NO: 5476 - DNA, 23 bp, Homo sapiens
  source 1..23: mol_type = genomic DNA
caggggccacttttaaactaggg

SEQ ID NO: 5477 - DNA, 23 bp, Homo sapiens
  source 1..23: mol_type = genomic DNA
tgataagtcctatgagaagcagg

SEQ ID NO: 5478 - DNA, 23 bp, Homo sapiens
  source 1..23: mol_type = genomic DNA
ggtagagagtttctttcccaagg

SEQ ID NO: 5479 - DNA, 23 bp, Homo sapiens
  source 1..23: mol_type = genomic DNA
acctaaactgcaaagcaaaccgg

SEQ ID NO: 5480 - DNA, 23 bp, Homo sapiens
  source 1..23: mol_type = genomic DNA
ggtcaaaatgtcacaccaaaagg

SEQ ID NO: 5481 - DNA, 23 bp, Homo sapiens
  source 1..23: mol_type = genomic DNA
tgagcaagaaggtaaccaaaagg

SEQ ID NO: 5482 - DNA, 23 bp, Homo sapiens
  source 1..23: mol_type = genomic DNA
gcaaatttaatcacctctgaggg

SEQ ID NO: 5483 - DNA, 23 bp, Homo sapiens
  source 1..23: mol_type = genomic DNA
ctcaacctaatttatttctgcgg

SEQ ID NO: 5484 - DNA, 23 bp, Homo sapiens
  source 1..23: mol_type = genomic DNA
tcaaattctatgaggtagagagg

SEQ ID NO: 5485 - DNA, 23 bp, Homo sapiens
  source 1..23: mol_type = genomic DNA
tgtattttgtctttgtgcaaagg

SEQ ID NO: 5486 - DNA, 23 bp, Homo sapiens
  source 1..23: mol_type = genomic DNA
ataaaactgaatccttaagctgg

SEQ ID NO: 5487 - DNA, 23 bp, Homo sapiens
  source 1..23: mol_type = genomic DNA
ttagctaacttgctttaccttgg

SEQ ID NO: 5488 - DNA, 23 bp, Homo sapiens
  source 1..23: mol_type = genomic DNA
aggaaatagtagggtgacatagg

SEQ ID NO: 5489 - DNA, 23 bp, Homo sapiens
  source 1..23: mol_type = genomic DNA
ctttaatccagtgccaggcccgg

SEQ ID NO: 5490 - DNA, 23 bp, Homo sapiens
  source 1..23: mol_type = genomic DNA
tagagacccttgactaatgcagg

SEQ ID NO: 5491 - DNA, 23 bp, Homo sapiens
  source 1..23: mol_type = genomic DNA
aagaagagacgaattttgcttgg

SEQ ID NO: 5492 - DNA, 23 bp, Homo sapiens
  source 1..23: mol_type = genomic DNA
gctcttgtctcaagatgacttgg

SEQ ID NO: 5493 - DNA, 23 bp, Homo sapiens
  source 1..23: mol_type = genomic DNA
gcgtcttgcctacctgtctccgg

SEQ ID NO: 5494 - DNA, 23 bp, Homo sapiens
  source 1..23: mol_type = genomic DNA
atgtatgtatggtacatgtaagg

SEQ ID NO: 5495 - DNA, 23 bp, Homo sapiens
  source 1..23: mol_type = genomic DNA
gacaggtcatccctagcagctgg

SEQ ID NO: 5496 - DNA, 23 bp, Homo sapiens
  source 1..23: mol_type = genomic DNA
atttgcatcattgtccctgcagg

SEQ ID NO: 5497 - DNA, 23 bp, Homo sapiens
  source 1..23: mol_type = genomic DNA
tttcttctatcatttccaaaagg

SEQ ID NO: 5498 - DNA, 23 bp, Homo sapiens
  source 1..23: mol_type = genomic DNA
ttgagcaagactacacctaatgg

SEQ ID NO: 5499 - DNA, 23 bp, Homo sapiens
  source 1..23: mol_type = genomic DNA
tatacattcctgcctttgatggg

SEQ ID NO: 5500 - DNA, 23 bp, Homo sapiens
  source 1..23: mol_type = genomic DNA
aatatccaaaagttaatcaatgg

SEQ ID NO: 5501 - DNA, 23 bp, Homo sapiens
  source 1..23: mol_type = genomic DNA
ttattttcaatgattttccatgg

SEQ ID NO: 5502 - DNA, 23 bp, Homo sapiens
  source 1..23: mol_type = genomic DNA
tttgggagaagaaattcagtagg

SEQ ID NO: 5503 - DNA, 23 bp, Homo sapiens
  source 1..23: mol_type = genomic DNA
aattcagaaggaccggagacagg

SEQ ID NO: 5504 - DNA, 23 bp, Homo sapiens
  source 1..23: mol_type = genomic DNA
cttttctgacagaaacggtatgg

SEQ ID NO: 5505 - DNA, 23 bp, Homo sapiens
  source 1..23: mol_type = genomic DNA
gagtgagtagtatgagcaaatgg

SEQ ID NO: 5506 - DNA, 23 bp, Homo sapiens
  source 1..23: mol_type = genomic DNA
gggatgaaagaggagacaaaggg

SEQ ID NO: 5507 - DNA, 23 bp, Homo sapiens
  source 1..23: mol_type = genomic DNA
ggaactcaggtaaaactagtagg

SEQ ID NO: 5508 - DNA, 23 bp, Homo sapiens
  source 1..23: mol_type = genomic DNA
atgctgttctccccaaagcaggg

SEQ ID NO: 5509 - DNA, 23 bp, Homo sapiens
  source 1..23: mol_type = genomic DNA
ctcagacttagtcatctaaaggg

SEQ ID NO: 5510 - DNA, 23 bp, Homo sapiens
  source 1..23: mol_type = genomic DNA
cagactgttcttgggccgctggg

SEQ ID NO: 5511 - DNA, 23 bp, Homo sapiens
  source 1..23: mol_type = genomic DNA
tttcagggacatattcagaaagg

SEQ ID NO: 5512 - DNA, 23 bp, Homo sapiens
  source 1..23: mol_type = genomic DNA
agacgaattttgcttggctaggg

SEQ ID NO: 5513 - DNA, 23 bp, Homo sapiens
  source 1..23: mol_type = genomic DNA
cttaattttgtaatttcccaggg

SEQ ID NO: 5514 - DNA, 23 bp, Homo sapiens
  source 1..23: mol_type = genomic DNA
ctgtcagaaaagcaaccattggg

SEQ ID NO: 5515 - DNA, 23 bp, Homo sapiens
  source 1..23: mol_type = genomic DNA
tggaatagactaaactgcactgg

SEQ ID NO: 5516 - DNA, 23 bp, Homo sapiens
  source 1..23: mol_type = genomic DNA
ccttatccatccttactacctgg

SEQ ID NO: 5517 - DNA, 23 bp, Homo sapiens
  source 1..23: mol_type = genomic DNA
ttaccaagtttccatttacaagg

SEQ ID NO: 5518 - DNA, 23 bp, Homo sapiens
  source 1..23: mol_type = genomic DNA
gatgtactatttttgaagccagg

SEQ ID NO: 5519 - DNA, 23 bp, Homo sapiens
  source 1..23: mol_type = genomic DNA
gcaatgtctgtgaattgcccagg

SEQ ID NO: 5520 - DNA, 23 bp, Homo sapiens
  source 1..23: mol_type = genomic DNA
aagacaaaaccccagagaaaggg

SEQ ID NO: 5521 - DNA, 23 bp, Homo sapiens
  source 1..23: mol_type = genomic DNA
aaacactcagagtagacaacagg

SEQ ID NO: 5522 - DNA, 23 bp, Homo sapiens
  source 1..23: mol_type = genomic DNA
acttccacgattaaaaacatagg

SEQ ID NO: 5523 - DNA, 23 bp, Homo sapiens
  source 1..23: mol_type = genomic DNA
catgctcacgattcttgcctggg

SEQ ID NO: 5524 - DNA, 23 bp, Homo sapiens
  source 1..23: mol_type = genomic DNA
actcttttcatgattagagatgg

SEQ ID NO: 5525 - DNA, 23 bp, Homo sapiens
  source 1..23: mol_type = genomic DNA
atctctttcccttcaagagaggg

SEQ ID NO: 5526 - DNA, 23 bp, Homo sapiens
  source 1..23: mol_type = genomic DNA
ggagtcctataggataatttggg

SEQ ID NO: 5527 - DNA, 23 bp, Homo sapiens
  source 1..23: mol_type = genomic DNA
tgtaaagctggacttcaagttgg

SEQ ID NO: 5528 - DNA, 23 bp, Homo sapiens
  source 1..23: mol_type = genomic DNA
atattactgcagtacaagccagg

SEQ ID NO: 5529 - DNA, 23 bp, Homo sapiens
  source 1..23: mol_type = genomic DNA
ggcattttgtgcaatgctgaggg

SEQ ID NO: 5530 - DNA, 23 bp, Homo sapiens
  source 1..23: mol_type = genomic DNA
gacatactctccagctgctaggg

SEQ ID NO: 5531 - DNA, 23 bp, Homo sapiens
  source 1..23: mol_type = genomic DNA
cctgctttgctcaaatgtcaggg

SEQ ID NO: 5532 - DNA, 23 bp, Homo sapiens
  source 1..23: mol_type = genomic DNA
catctttaaaaagtttctatggg

SEQ ID NO: 5533 - DNA, 23 bp, Homo sapiens
  source 1..23: mol_type = genomic DNA
tcgcctggcttgtttgtgcaagg

SEQ ID NO: 5534 - DNA, 23 bp, Homo sapiens
  source 1..23: mol_type = genomic DNA
tcataaaatgtaatatctgttgg

SEQ ID NO: 5535 - DNA, 23 bp, Homo sapiens
  source 1..23: mol_type = genomic DNA
ggtccttggagcaatcgtattgg

SEQ ID NO: 5536 - DNA, 23 bp, Homo sapiens
  source 1..23: mol_type = genomic DNA
ggtctattcatagacttgtatgg

SEQ ID NO: 5537 - DNA, 23 bp, Homo sapiens
  source 1..23: mol_type = genomic DNA
gtattcttattcccattatgtgg

SEQ ID NO: 5538 - DNA, 23 bp, Homo sapiens
  source 1..23: mol_type = genomic DNA
agtattctacttagagaaagagg

SEQ ID NO: 5539 - DNA, 23 bp, Homo sapiens
  source 1..23: mol_type = genomic DNA
attcctttacactctaaaagtgg

SEQ ID NO: 5540 - DNA, 23 bp, Homo sapiens
  source 1..23: mol_type = genomic DNA
gagtcccaagtacaccttgatgg

SEQ ID NO: 5541 - DNA, 23 bp, Homo sapiens
  source 1..23: mol_type = genomic DNA
ttgactttgcccttgccaaaagg

SEQ ID NO: 5542 - DNA, 23 bp, Homo sapiens
  source 1..23: mol_type = genomic DNA
gtgacatacaaaaagtctactgg

SEQ ID NO: 5543 - DNA, 23 bp, Homo sapiens
  source 1..23: mol_type = genomic DNA
attgtgttaatggattataatgg

SEQ ID NO: 5544 - DNA, 23 bp, Homo sapiens
  source 1..23: mol_type = genomic DNA
gatcagcctttggtagagatagg

SEQ ID NO: 5545 - DNA, 23 bp, Homo sapiens
  source 1..23: mol_type = genomic DNA
tctctttctaacggtaaaagtgg

SEQ ID NO: 5546 - DNA, 23 bp, Homo sapiens
  source 1..23: mol_type = genomic DNA
tttttgtctaagtatatatgtgg

SEQ ID NO: 5547 - DNA, 23 bp, Homo sapiens
  source 1..23: mol_type = genomic DNA
ttacgtatgtatgacttgcttgg

SEQ ID NO: 5548 - DNA, 23 bp, Homo sapiens
  source 1..23: mol_type = genomic DNA
tgttgtacctcaaatagcttagg

SEQ ID NO: 5549 - DNA, 23 bp, Homo sapiens
  source 1..23: mol_type = genomic DNA
tggcatgtcacctaactggctgg

SEQ ID NO: 5550 - DNA, 23 bp, Homo sapiens
  source 1..23: mol_type = genomic DNA
tgtacttccctttattaagccgg

SEQ ID NO: 5551 - DNA, 23 bp, Homo sapiens
  source 1..23: mol_type = genomic DNA
tactgctttggagtattgaaagg

SEQ ID NO: 5552 - DNA, 23 bp, Homo sapiens
  source 1..23: mol_type = genomic DNA
tctattatcaagcatatcctagg

SEQ ID NO: 5553 - DNA, 23 bp, Homo sapiens
  source 1..23: mol_type = genomic DNA
ttaaaaagcacctagaggattgg

SEQ ID NO: 5554 - DNA, 23 bp, Homo sapiens
  source 1..23: mol_type = genomic DNA
ctttgtggatatgtgactaaagg

SEQ ID NO: 5555 - DNA, 23 bp, Homo sapiens
  source 1..23: mol_type = genomic DNA
cacagaaagttggaaccaaaggg

SEQ ID NO: 5556 - DNA, 23 bp, Homo sapiens
  source 1..23: mol_type = genomic DNA
ttctgcttatgtgtaagccttgg

SEQ ID NO: 5557 - DNA, 23 bp, Homo sapiens
  source 1..23: mol_type = genomic DNA
acttagagagtatacattgaagg

SEQ ID NO: 5558 - DNA, 23 bp, Homo sapiens
  source 1..23: mol_type = genomic DNA
tgcctagtcccaatttctggtgg

SEQ ID NO: 5559 - DNA, 23 bp, Homo sapiens
  source 1..23: mol_type = genomic DNA
tcaaggcagttacgggtaaaggg

SEQ ID NO: 5560 - DNA, 23 bp, Homo sapiens
  source 1..23: mol_type = genomic DNA
taggattagcttatcccaaaggg

SEQ ID NO: 5561 - DNA, 23 bp, Homo sapiens
  source 1..23: mol_type = genomic DNA
gactgctctgggttgtactaagg

SEQ ID NO: 5562 - DNA, 23 bp, Homo sapiens
  source 1..23: mol_type = genomic DNA
acatgaatcccaaagccatcagg

SEQ ID NO: 5563 - DNA, 23 bp, Homo sapiens
  source 1..23: mol_type = genomic DNA
tgttttttctcctaaatagcagg

SEQ ID NO: 5564 - DNA, 23 bp, Homo sapiens
  source 1..23: mol_type = genomic DNA
tttcccttcaagagagggagtgg

SEQ ID NO: 5565 - DNA, 23 bp, Homo sapiens
  source 1..23: mol_type = genomic DNA
catgaattcctccttgggccagg

SEQ ID NO: 5566 - DNA, 23 bp, Homo sapiens
  source 1..23: mol_type = genomic DNA
tgaaaggagttttagtatagggg

SEQ ID NO: 5567 - DNA, 23 bp, Homo sapiens
  source 1..23: mol_type = genomic DNA
gagaccactccagagaatatagg

SEQ ID NO: 5568 - DNA, 23 bp, Homo sapiens
  source 1..23: mol_type = genomic DNA
ataatacaagtcgaaaaagttgg

SEQ ID NO: 5569 - DNA, 23 bp, Homo sapiens
  source 1..23: mol_type = genomic DNA
gttgctccaaattttaacttggg

SEQ ID NO: 5570 - DNA, 23 bp, Homo sapiens
  source 1..23: mol_type = genomic DNA
acaaacaaatataatgaaaacgg

SEQ ID NO: 5571 - DNA, 23 bp, Homo sapiens
  source 1..23: mol_type = genomic DNA
tttatttcaagaaaaaaagcagg

SEQ ID NO: 5572 - DNA, 23 bp, Homo sapiens
  source 1..23: mol_type = genomic DNA
atgatttgctttcatcatgatgg

SEQ ID NO: 5573 - DNA, 23 bp, Homo sapiens
  source 1..23: mol_type = genomic DNA
agaaacccagcaagctgaaaggg

SEQ ID NO: 5574 - DNA, 23 bp, Homo sapiens
  source 1..23: mol_type = genomic DNA
gatctatgtaaaaccttccatgg

SEQ ID NO: 5575 - DNA, 23 bp, Homo sapiens
  source 1..23: mol_type = genomic DNA
aaatgagtgaatacataaaacgg

SEQ ID NO: 5576 - DNA, 23 bp, Homo sapiens
  source 1..23: mol_type = genomic DNA
ttgcatctcactaggcaaatggg

SEQ ID NO: 5577 - DNA, 23 bp, Homo sapiens
  source 1..23: mol_type = genomic DNA
tagacacttttgaagaagatggg

SEQ ID NO: 5578 - DNA, 23 bp, Homo sapiens
  source 1..23: mol_type = genomic DNA
ttatgggataaagaaacatatgg

SEQ ID NO: 5579 - DNA, 23 bp, Homo sapiens
  source 1..23: mol_type = genomic DNA
catactagattaacttgaaaggg

SEQ ID NO: 5580 - DNA, 23 bp, Homo sapiens
  source 1..23: mol_type = genomic DNA
tcatacacatttttaaaagcagg

SEQ ID NO: 5581 - DNA, 23 bp, Homo sapiens
  source 1..23: mol_type = genomic DNA
gctctgctgcatggtagaacagg

SEQ ID NO: 5582 - DNA, 23 bp, Homo sapiens
  source 1..23: mol_type = genomic DNA
ttttatgaattcagaaggaccgg

SEQ ID NO: 5583 - DNA, 23 bp, Homo sapiens
  source 1..23: mol_type = genomic DNA
gaaaacatgttatatgagaatgg

SEQ ID NO: 5584 - DNA, 23 bp, Homo sapiens
  source 1..23: mol_type = genomic DNA
ccactcagttcacttgataaggg

SEQ ID NO: 5585 - DNA, 23 bp, Homo sapiens
  source 1..23: mol_type = genomic DNA
gatacagtgccaggatttgaagg

SEQ ID NO: 5586 - DNA, 23 bp, Homo sapiens
  source 1..23: mol_type = genomic DNA
atatttctgaggactgggggtgg

SEQ ID NO: 5587 - DNA, 23 bp, Homo sapiens
  source 1..23: mol_type = genomic DNA
gggaaaggtgagagaagtcttgg

SEQ ID NO: 5588 - DNA, 23 bp, Homo sapiens
  source 1..23: mol_type = genomic DNA
atcaaactgtgaatttaaagtgg

SEQ ID NO: 5589 - DNA, 23 bp, Homo sapiens
  source 1..23: mol_type = genomic DNA
tgtgaatccccagctccagctgg

SEQ ID NO: 5590 - DNA, 23 bp, Homo sapiens
  source 1..23: mol_type = genomic DNA
atattgccacggaagaaggctgg

SEQ ID NO: 5591 - DNA, 23 bp, Homo sapiens
  source 1..23: mol_type = genomic DNA
ctgggcctgctgtattccctggg

SEQ ID NO: 5592 - DNA, 23 bp, Homo sapiens
  source 1..23: mol_type = genomic DNA
catttgttgtttgttttctgtgg

SEQ ID NO: 5593 - DNA, 23 bp, Homo sapiens
  source 1..23: mol_type = genomic DNA
ttgcaactgctgtttaagctggg

SEQ ID NO: 5594 - DNA, 23 bp, Homo sapiens
  source 1..23: mol_type = genomic DNA
tcatggatctacacaacctctgg

SEQ ID NO: 5595 - DNA, 23 bp, Homo sapiens
  source 1..23: mol_type = genomic DNA
tgggagctctcacaagccttggg

SEQ ID NO: 5596 - DNA, 23 bp, Homo sapiens
  source 1..23: mol_type = genomic DNA
gattgttttctttacctgcaggg

SEQ ID NO: 5597 - DNA, 23 bp, Homo sapiens
  source 1..23: mol_type = genomic DNA
gagagtgagaacgaggatgaggg

SEQ ID NO: 5598 - DNA, 23 bp, Homo sapiens
  source 1..23: mol_type = genomic DNA
agccaggcgagagagaaaactgg

SEQ ID NO: 5599 - DNA, 23 bp, Homo sapiens
  source 1..23: mol_type = genomic DNA
agttatttatgaatacaaacagg

SEQ ID NO: 5600 - DNA, 23 bp, Homo sapiens
  source 1..23: mol_type = genomic DNA
attaaagtcagctttgcaaatgg

SEQ ID NO: 5601 - DNA, 23 bp, Homo sapiens
  source 1..23: mol_type = genomic DNA
acatccagatattcaatagtagg

SEQ ID NO: 5602 - DNA, 23 bp, Homo sapiens
  source 1..23: mol_type = genomic DNA
atacctggaagatatataatggg

SEQ ID NO: 5603 - DNA, 23 bp, Homo sapiens
  source 1..23: mol_type = genomic DNA
ctcattcctacttaataggatgg

SEQ ID NO: 5604 - DNA, 23 bp, Homo sapiens
  source 1..23: mol_type = genomic DNA
atcattatcagcttgaaaagtgg

SEQ ID NO: 5605 - DNA, 23 bp, Homo sapiens
  source 1..23: mol_type = genomic DNA
attgtttgctaccaggagaaagg

SEQ ID NO: 5606 - DNA, 23 bp, Homo sapiens
  source 1..23: mol_type = genomic DNA
agacaatgctagttttagtaggg

SEQ ID NO: 5607 - DNA, 23 bp, Homo sapiens
  source 1..23: mol_type = genomic DNA
tcaggtgtgatactgtaaacagg

SEQ ID NO: 5608 - DNA, 23 bp, Homo sapiens
  source 1..23: mol_type = genomic DNA
cttcaagagaggatgactatagg

SEQ ID NO: 5609 - DNA, 23 bp, Homo sapiens
  source 1..23: mol_type = genomic DNA
ttctggccttaagttcaaaaggg

SEQ ID NO: 5610 - DNA, 23 bp, Homo sapiens
  source 1..23: mol_type = genomic DNA
ttgcctctgcacctttacactgg

SEQ ID NO: 5611 - DNA, 23 bp, Homo sapiens
  source 1..23: mol_type = genomic DNA
tttaaaatatcaactacctcagg

SEQ ID NO: 5612 - DNA, 23 bp, Homo sapiens
  source 1..23: mol_type = genomic DNA
gtatgctaattaaaatatacagg

SEQ ID NO: 5613 - DNA, 23 bp, Homo sapiens
  source 1..23: mol_type = genomic DNA
cattttaccaggtattctaaagg

SEQ ID NO: 5614 - DNA, 23 bp, Homo sapiens
  source 1..23: mol_type = genomic DNA
gatggtatatatataatccttgg

SEQ ID NO: 5615 - DNA, 23 bp, Homo sapiens
  source 1..23: mol_type = genomic DNA
ttttaggtcctttcgtgttgtgg

SEQ ID NO: 5616 - DNA, 23 bp, Homo sapiens
  source 1..23: mol_type = genomic DNA
atgtacaagcccgaaaaggctgg

SEQ ID NO: 5617 - DNA, 23 bp, Homo sapiens
  source 1..23: mol_type = genomic DNA
gacccttgcaatagataagttgg

SEQ ID NO: 5618 - DNA, 23 bp, Homo sapiens
  source 1..23: mol_type = genomic DNA
ccagcaaacacagtgctcaatgg

SEQ ID NO: 5619 - DNA, 23 bp, Homo sapiens
  source 1..23: mol_type = genomic DNA
tgtatcatgcatactaaagatgg

SEQ ID NO: 5620 - DNA, 23 bp, Homo sapiens
  source 1..23: mol_type = genomic DNA
tctctatgacacactatactagg

SEQ ID NO: 5621 - DNA, 23 bp, Homo sapiens
  source 1..23: mol_type = genomic DNA
cgctgtttcccgaaatgccaagg

SEQ ID NO: 5622 - DNA, 23 bp, Homo sapiens
  source 1..23: mol_type = genomic DNA
gatcaagaatggatggaaacagg

SEQ ID NO: 5623 - DNA, 23 bp, Homo sapiens
  source 1..23: mol_type = genomic DNA
acaagtagcagggtagaatcagg

SEQ ID NO: 5624 - DNA, 23 bp, Homo sapiens
  source 1..23: mol_type = genomic DNA
aatttactaagttatttgaatgg

SEQ ID NO: 5625 - DNA, 23 bp, Homo sapiens
  source 1..23: mol_type = genomic DNA
ggcatgtttggtcttgcaaaggg

SEQ ID NO: 5626 - DNA, 23 bp, Homo sapiens
  source 1..23: mol_type = genomic DNA
ttagaccaacgcattgtagttgg

SEQ ID NO: 5627 - DNA, 23 bp, Homo sapiens
  source 1..23: mol_type = genomic DNA
cagcttttaaaaggaggaggggg

SEQ ID NO: 5628 - DNA, 23 bp, Homo sapiens
  source 1..23: mol_type = genomic DNA
tactaaacacagacaaatgatgg

SEQ ID NO: 5629 - DNA, 23 bp, Homo sapiens
  source 1..23: mol_type = genomic DNA
cacagaaattaacttcaataggg

SEQ ID NO: 5630 - DNA, 23 bp, Homo sapiens
  source 1..23: mol_type = genomic DNA
aacatactatttctcttggatgg

SEQ ID NO: 5631 - DNA, 23 bp, Homo sapiens
  source 1..23: mol_type = genomic DNA
ctcactgtcaattttgagtgggg

SEQ ID NO: 5632 - DNA, 23 bp, Homo sapiens
  source 1..23: mol_type = genomic DNA
gttaagacattattaaagtgtgg

SEQ ID NO: 5633 - DNA, 23 bp, Homo sapiens
  source 1..23: mol_type = genomic DNA
ggaataacaaatgaatcataagg

SEQ ID NO: 5634 - DNA, 23 bp, Homo sapiens
  source 1..23: mol_type = genomic DNA
agtgatctccctaagcatacagg

SEQ ID NO: 5635 - DNA, 23 bp, Homo sapiens
  source 1..23: mol_type = genomic DNA
tctgggttgtactaaggagtagg

SEQ ID NO: 5636 - DNA, 23 bp, Homo sapiens
  source 1..23: mol_type = genomic DNA
ggcatcactaggaatacaacagg

SEQ ID NO: 5637 - DNA, 23 bp, Homo sapiens
  source 1..23: mol_type = genomic DNA
aacactaatcaaaagcaaatcgg

SEQ ID NO: 5638 - DNA, 23 bp, Homo sapiens
  source 1..23: mol_type = genomic DNA
tctatctcgtaaataagagctgg

SEQ ID NO: 5639 - DNA, 23 bp, Homo sapiens
  source 1..23: mol_type = genomic DNA
atttttccaaatgactaagtagg

SEQ ID NO: 5640 - DNA, 23 bp, Homo sapiens
  source 1..23: mol_type = genomic DNA
aaaatgtttgtcatagaaaaggg

SEQ ID NO: 5641 - DNA, 23 bp, Homo sapiens
  source 1..23: mol_type = genomic DNA
aacactaaaccagtttcaaaagg

SEQ ID NO: 5642 - DNA, 23 bp, Homo sapiens
  source 1..23: mol_type = genomic DNA
tgagcatgtgtcttagcaaatgg

SEQ ID NO: 5643 - DNA, 23 bp, Homo sapiens
  source 1..23: mol_type = genomic DNA
gcatcaggctggtagttgctagg

SEQ ID NO: 5644 - DNA, 23 bp, Homo sapiens
  source 1..23: mol_type = genomic DNA
tgtagagaaataagaggaaccgg

SEQ ID NO: 5645 - DNA, 23 bp, Homo sapiens
  source 1..23: mol_type = genomic DNA
tggagaagcaagagaagctaagg

SEQ ID NO: 5646 - DNA, 23 bp, Homo sapiens
  source 1..23: mol_type = genomic DNA
tgcagctcctcatatttgatggg

SEQ ID NO: 5647 - DNA, 23 bp, Homo sapiens
  source 1..23: mol_type = genomic DNA
ccaaaattccattggaatgacgg

SEQ ID NO: 5648 - DNA, 23 bp, Homo sapiens
  source 1..23: mol_type = genomic DNA
tgtctattgccaaatgtaaaggg

SEQ ID NO: 5649 - DNA, 23 bp, Homo sapiens
  source 1..23: mol_type = genomic DNA
tgagccactttattgttgatggg

SEQ ID NO: 5650 - DNA, 23 bp, Homo sapiens
  source 1..23: mol_type = genomic DNA
attgcactgcacattgccttcgg

SEQ ID NO: 5651 - DNA, 23 bp, Homo sapiens
  source 1..23: mol_type = genomic DNA
gccaaaataaaggggatgtcagg

SEQ ID NO: 5652 - DNA, 23 bp, Homo sapiens
  source 1..23: mol_type = genomic DNA
tggagtacagttcaaaaataggg

SEQ ID NO: 5653 - DNA, 23 bp, Homo sapiens
  source 1..23: mol_type = genomic DNA
gctgaaatgagacacgttgccgg

SEQ ID NO: 5654 - DNA, 23 bp, Homo sapiens
  source 1..23: mol_type = genomic DNA
tcctagtcttgcaaatgctaggg

SEQ ID NO: 5655 - DNA, 23 bp, Homo sapiens
  source 1..23: mol_type = genomic DNA
ctattgtagccatatcaataagg

SEQ ID NO: 5656 - DNA, 23 bp, Homo sapiens
  source 1..23: mol_type = genomic DNA
ccatctaccctgatttttggagg

SEQ ID NO: 5657 - DNA, 23 bp, Homo sapiens
  source 1..23: mol_type = genomic DNA
ttttgtgtttcagggcagatagg

SEQ ID NO: 5658 - DNA, 23 bp, Homo sapiens
  source 1..23: mol_type = genomic DNA
gcctgggtctgacataactttgg

SEQ ID NO: 5659 - DNA, 23 bp, Homo sapiens
  source 1..23: mol_type = genomic DNA
aggttctccgggagtaaacttgg

SEQ ID NO: 5660 - DNA, 23 bp, Homo sapiens
  source 1..23: mol_type = genomic DNA
tgctctttacatacactccttgg

SEQ ID NO: 5661 - DNA, 23 bp, Homo sapiens
  source 1..23: mol_type = genomic DNA
atccatctagtgtttgattgagg

SEQ ID NO: 5662 - DNA, 23 bp, Homo sapiens
  source 1..23: mol_type = genomic DNA
ttttggctataacctctaaaggg

SEQ ID NO: 5663 - DNA, 23 bp, Homo sapiens
  source 1..23: mol_type = genomic DNA
gtgtccttatagcttcttggtgg

SEQ ID NO: 5664 - DNA, 23 bp, Homo sapiens
  source 1..23: mol_type = genomic DNA
tttacgttcaaatgttgtaaagg

SEQ ID NO: 5665 - DNA, 23 bp, Homo sapiens
  source 1..23: mol_type = genomic DNA
tcatttgcatcactgctgcttgg

SEQ ID NO: 5666 - DNA, 23 bp, Homo sapiens
  source 1..23: mol_type = genomic DNA
actgatctatcagccaaaatcgg

SEQ ID NO: 5667 - DNA, 23 bp, Homo sapiens
  source 1..23: mol_type = genomic DNA
ctatgttacactcagttagctgg

SEQ ID NO: 5668 - DNA, 23 bp, Homo sapiens
  source 1..23: mol_type = genomic DNA
tttcactgcaatcctttcatggg

SEQ ID NO: 5669 - DNA, 23 bp, Homo sapiens
  source 1..23: mol_type = genomic DNA
tgtgaggccagtttgctaaaggg

SEQ ID NO: 5670 - DNA, 23 bp, Homo sapiens
  source 1..23: mol_type = genomic DNA
atagatcagctgctacactatgg

SEQ ID NO: 5671 - DNA, 23 bp, Homo sapiens
  source 1..23: mol_type = genomic DNA
ggtgatctacaagagaagttggg

SEQ ID NO: 5672 - DNA, 23 bp, Homo sapiens
  source 1..23: mol_type = genomic DNA
aataattgctagagggaaaaggg

SEQ ID NO: 5673 - DNA, 23 bp, Homo sapiens
  source 1..23: mol_type = genomic DNA
tgatcaaaaaagtataaaacagg

SEQ ID NO: 5674 - DNA, 23 bp, Homo sapiens
  source 1..23: mol_type = genomic DNA
ttaaactacattgaattccctgg

SEQ ID NO: 5675 - DNA, 23 bp, Homo sapiens
  source 1..23: mol_type = genomic DNA
attcaggtaagtgcttaattggg

SEQ ID NO: 5676 - DNA, 23 bp, Homo sapiens
  source 1..23: mol_type = genomic DNA
ataagacacagcattttctcagg

SEQ ID NO: 5677 - DNA, 23 bp, Homo sapiens
  source 1..23: mol_type = genomic DNA
gagaatctatattctacataggg

SEQ ID NO: 5678 - DNA, 23 bp, Homo sapiens
  source 1..23: mol_type = genomic DNA
ttgtatggattttatctgatggg

SEQ ID NO: 5679 - DNA, 23 bp, Homo sapiens
  source 1..23: mol_type = genomic DNA
gttgtgctttggtttaccttggg

SEQ ID NO: 5680 - DNA, 23 bp, Homo sapiens
  source 1..23: mol_type = genomic DNA
aatcatagattctttgctaaggg

SEQ ID NO: 5681 - DNA, 23 bp, Homo sapiens
  source 1..23: mol_type = genomic DNA
ttaggaagcaccagccagttagg

SEQ ID NO: 5682 - DNA, 23 bp, Homo sapiens
  source 1..23: mol_type = genomic DNA
catgtgtcctgaggacctacagg

SEQ ID NO: 5683 - DNA, 23 bp, Homo sapiens
  source 1..23: mol_type = genomic DNA
gctgacgctgacacgggcattgg

SEQ ID NO: 5684 - DNA, 23 bp, Homo sapiens
  source 1..23: mol_type = genomic DNA
ttgaagactcccttttaagttgg

SEQ ID NO: 5685 - DNA, 23 bp, Homo sapiens
  source 1..23: mol_type = genomic DNA
tattatactaaattaaaaacagg

SEQ ID NO: 5686 - DNA, 23 bp, Homo sapiens
  source 1..23: mol_type = genomic DNA
cttcagtgtgtacagtaataggg

SEQ ID NO: 5687 - DNA, 23 bp, Homo sapiens
  source 1..23: mol_type = genomic DNA
ttttgcctggataattcaaatgg

SEQ ID NO: 5688 - DNA, 23 bp, Homo sapiens
  source 1..23: mol_type = genomic DNA
aacagggccttatgattaaaggg

SEQ ID NO: 5689 - DNA, 23 bp, Homo sapiens
  source 1..23: mol_type = genomic DNA
gtattttgtacatgaggaaaagg

SEQ ID NO: 5690 - DNA, 23 bp, Homo sapiens
  source 1..23: mol_type = genomic DNA
ctgagtgtaacatagaatatagg

SEQ ID NO: 5691 - DNA, 23 bp, Homo sapiens
  source 1..23: mol_type = genomic DNA
ttaagaacagactgttggccagg

SEQ ID NO: 5692 - DNA, 23 bp, Homo sapiens
  source 1..23: mol_type = genomic DNA
aattatcaaaccccattatgagg

SEQ ID NO: 5693 - DNA, 23 bp, Homo sapiens
  source 1..23: mol_type = genomic DNA
atccatgccggcttaataaaggg

SEQ ID NO: 5694 - DNA, 23 bp, Homo sapiens
  source 1..23: mol_type = genomic DNA
cttaactaatcacattgcttggg

SEQ ID NO: 5695 - DNA, 23 bp, Homo sapiens
  source 1..23: mol_type = genomic DNA
ctgtttctagaactatattgtgg

SEQ ID NO: 5696 - DNA, 23 bp, Homo sapiens
  source 1..23: mol_type = genomic DNA
gacaaagttccttatttgctcgg

SEQ ID NO: 5697 - DNA, 23 bp, Homo sapiens
  source 1..23: mol_type = genomic DNA
tgttccctgcttgaagtacccgg

SEQ ID NO: 5698 - DNA, 23 bp, Homo sapiens
  source 1..23: mol_type = genomic DNA
ctgtgaagctctaaaacaacagg

SEQ ID NO: 5699 - DNA, 23 bp, Homo sapiens
  source 1..23: mol_type = genomic DNA
acatttggaaactctgtaaaggg

SEQ ID NO: 5700 - DNA, 23 bp, Homo sapiens
  source 1..23: mol_type = genomic DNA
tattaagaatatcatgaaaaggg

SEQ ID NO: 5701 - DNA, 23 bp, Homo sapiens
  source 1..23: mol_type = genomic DNA
cattcattgccaacttaaaaggg

SEQ ID NO: 5702 - DNA, 23 bp, Homo sapiens
  source 1..23: mol_type = genomic DNA
ttgtttttcaaattgaatgaagg

SEQ ID NO: 5703 - DNA, 23 bp, Homo sapiens
  source 1..23: mol_type = genomic DNA
caagaatgaatgcattttggagg

SEQ ID NO: 5704 - DNA, 23 bp, Homo sapiens
  source 1..23: mol_type = genomic DNA
ttttcttcatcaccaaatacagg

SEQ ID NO: 5705 - DNA, 23 bp, Homo sapiens
  source 1..23: mol_type = genomic DNA
aaagtcttccatgtgagattcgg

SEQ ID NO: 5706 - DNA, 23 bp, Homo sapiens
  source 1..23: mol_type = genomic DNA
atctctgtatcttcaggcactgg

SEQ ID NO: 5707 - DNA, 23 bp, Homo sapiens
  source 1..23: mol_type = genomic DNA
tagactgtaatatccaatatggg

SEQ ID NO: 5708 - DNA, 23 bp, Homo sapiens
  source 1..23: mol_type = genomic DNA
tgtactatgtgcaattaactagg

SEQ ID NO: 5709 - DNA, 23 bp, Homo sapiens
  source 1..23: mol_type = genomic DNA
tctactaatccattgaactaagg

SEQ ID NO: 5710 - DNA, 23 bp, Homo sapiens
  source 1..23: mol_type = genomic DNA
gtgatgccaaaacaaacaactgg

SEQ ID NO: 5711 - DNA, 23 bp, Homo sapiens
  source 1..23: mol_type = genomic DNA
tttaatctgaagaaatccttggg

SEQ ID NO: 5712 - DNA, 23 bp, Homo sapiens
  source 1..23: mol_type = genomic DNA
tatgttcctggttcaggaaacgg

SEQ ID NO: 5713 - DNA, 23 bp, Homo sapiens
  source 1..23: mol_type = genomic DNA
tgaattgtatctcttcagaaagg

SEQ ID NO: 5714 - DNA, 23 bp, Homo sapiens
  source 1..23: mol_type = genomic DNA
gagttatccagtatgagaatagg

SEQ ID NO: 5715 - DNA, 23 bp, Homo sapiens
  source 1..23: mol_type = genomic DNA
ttatctttgatttcgattagagg

SEQ ID NO: 5716 - DNA, 23 bp, Homo sapiens
  source 1..23: mol_type = genomic DNA
aaaaggtcattcccctttgaggg

SEQ ID NO: 5717 - DNA, 23 bp, Homo sapiens
  source 1..23: mol_type = genomic DNA
aaatatgctctaaactatagtgg

SEQ ID NO: 5718 - DNA, 23 bp, Homo sapiens
  source 1..23: mol_type = genomic DNA
cttcagtgggtcaaatcccatgg

SEQ ID NO: 5719 - DNA, 23 bp, Homo sapiens
  source 1..23: mol_type = genomic DNA
ctaaaacccctcttggccttggg

SEQ ID NO: 5720 - DNA, 23 bp, Homo sapiens
  source 1..23: mol_type = genomic DNA
aataatttgaattaaaaaaacgg

SEQ ID NO: 5721 - DNA, 23 bp, Homo sapiens
  source 1..23: mol_type = genomic DNA
gcttgacttagctctgtgattgg

SEQ ID NO: 5722 - DNA, 23 bp, Homo sapiens
  source 1..23: mol_type = genomic DNA
gttctggcagggactgaagttgg

SEQ ID NO: 5723 - DNA, 23 bp, Homo sapiens
  source 1..23: mol_type = genomic DNA
tgacactaatctgtgccaaatgg

SEQ ID NO: 5724 - DNA, 23 bp, Homo sapiens
  source 1..23: mol_type = genomic DNA
tgatctccaactctgacaatggg

SEQ ID NO: 5725 - DNA, 23 bp, Homo sapiens
  source 1..23: mol_type = genomic DNA
atactgttaaacacaaaatcagg

SEQ ID NO: 5726 - DNA, 23 bp, Homo sapiens
  source 1..23: mol_type = genomic DNA
ttaaaatgttcaatggtagttgg

SEQ ID NO: 5727 - DNA, 23 bp, Homo sapiens
  source 1..23: mol_type = genomic DNA
gctgcatattatattttccatgg

SEQ ID NO: 5728 - DNA, 23 bp, Homo sapiens
  source 1..23: mol_type = genomic DNA
caattcttcttgctaaggcctgg

SEQ ID NO: 5729 - DNA, 23 bp, Homo sapiens
  source 1..23: mol_type = genomic DNA
tatgccactcttaaagccttggg

SEQ ID NO: 5730 - DNA, 23 bp, Homo sapiens
  source 1..23: mol_type = genomic DNA
cttagtttgcactcatcacctgg

SEQ ID NO: 5731 - DNA, 23 bp, Homo sapiens
  source 1..23: mol_type = genomic DNA
cttttcaaatttttaccaaaagg

SEQ ID NO: 5732 - DNA, 23 bp, Homo sapiens
  source 1..23: mol_type = genomic DNA
atctgcatttaatcaaccctggg

SEQ ID NO: 5733 - DNA, 23 bp, Homo sapiens
  source 1..23: mol_type = genomic DNA
tagataatctacagaacaaatgg

SEQ ID NO: 5734 - DNA, 23 bp, Homo sapiens
  source 1..23: mol_type = genomic DNA
atttgtgcttgtcattaagctgg

SEQ ID NO: 5735 - DNA, 23 bp, Homo sapiens
  source 1..23: mol_type = genomic DNA
ctgctcttttcccttctgtaggg

SEQ ID NO: 5736 - DNA, 23 bp, Homo sapiens
  source 1..23: mol_type = genomic DNA
tcttttccagttcaacaggctgg

SEQ ID NO: 5737 - DNA, 23 bp, Homo sapiens
  source 1..23: mol_type = genomic DNA
attatctttgaagaactcttggg

SEQ ID NO: 5738 - DNA, 23 bp, Homo sapiens
  source 1..23: mol_type = genomic DNA
gtactcttgctctcaagctctgg

SEQ ID NO: 5739 - DNA, 23 bp, Homo sapiens
  source 1..23: mol_type = genomic DNA
cccccctgcctgcttctcatagg

SEQ ID NO: 5740 - DNA, 23 bp, Homo sapiens
  source 1..23: mol_type = genomic DNA
tgttgtgctttggtttaccttgg

SEQ ID NO: 5741 - DNA, 23 bp, Homo sapiens
  source 1..23: mol_type = genomic DNA
ctcaaacctgagtaataaacagg

SEQ ID NO: 5742 - DNA, 23 bp, Homo sapiens
  source 1..23: mol_type = genomic DNA
gagatcctgtatcgtcatattgg

SEQ ID NO: 5743 - DNA, 23 bp, Homo sapiens
  source 1..23: mol_type = genomic DNA
ttaatatcagagttacccttagg

SEQ ID NO: 5744 - DNA, 23 bp, Homo sapiens
  source 1..23: mol_type = genomic DNA
tctgttaccattactgctgtggg

SEQ ID NO: 5745 - DNA, 23 bp, Homo sapiens
  source 1..23: mol_type = genomic DNA
gatagatgcacatcaacttaagg

SEQ ID NO: 5746 - DNA, 23 bp, Homo sapiens
  source 1..23: mol_type = genomic DNA
cttctcaagctccttgtaagtgg

SEQ ID NO: 5747 - DNA, 23 bp, Homo sapiens
  source 1..23: mol_type = genomic DNA
ctacactataagataaatgtagg

SEQ ID NO: 5748 - DNA, 23 bp, Homo sapiens
  source 1..23: mol_type = genomic DNA
ttgggcgtcaaggttgataaggg

SEQ ID NO: 5749 - DNA, 23 bp, Homo sapiens
  source 1..23: mol_type = genomic DNA
tgtgcacacacaacacattacgg

SEQ ID NO: 5750 - DNA, 23 bp, Homo sapiens
  source 1..23: mol_type = genomic DNA
gcttgccagtttttttcagtggg

SEQ ID NO: 5751 - DNA, 23 bp, Homo sapiens
  source 1..23: mol_type = genomic DNA
ttaggagcaattttattggcagg

SEQ ID NO: 5752 - DNA, 23 bp, Homo sapiens
  source 1..23: mol_type = genomic DNA
ctatgccctcctcatcctactgg

SEQ ID NO: 5753 - DNA, 23 bp, Homo sapiens
  source 1..23: mol_type = genomic DNA
gcatgaagcattagtggtggtgg

SEQ ID NO: 5754 - DNA, 23 bp, Homo sapiens
  source 1..23: mol_type = genomic DNA
tgaagccaagatgaggtaaaggg

SEQ ID NO: 5755 - DNA, 23 bp, Homo sapiens
  source 1..23: mol_type = genomic DNA
aggaacctcaaatcagactatgg

SEQ ID NO: 5756 - DNA, 23 bp, Homo sapiens
  source 1..23: mol_type = genomic DNA
gatgaattgtacatgaaatcagg

SEQ ID NO: 5757 - DNA, 23 bp, Homo sapiens
  source 1..23: mol_type = genomic DNA
taaattgccatggaaatcatagg

SEQ ID NO: 5758 - DNA, 23 bp, Homo sapiens
  source 1..23: mol_type = genomic DNA
cttatacagatgtagagcttagg

SEQ ID NO: 5759 - DNA, 23 bp, Homo sapiens
  source 1..23: mol_type = genomic DNA
atctctcccccttagacaaccgg

SEQ ID NO: 5760 - DNA, 23 bp, Homo sapiens
  source 1..23: mol_type = genomic DNA
tgaacgatggtgctcccctttgg

SEQ ID NO: 5761 - DNA, 23 bp, Homo sapiens
  source 1..23: mol_type = genomic DNA
ttcttcttccatgcctgtaaggg

SEQ ID NO: 5762 - DNA, 23 bp, Homo sapiens
  source 1..23: mol_type = genomic DNA
tcatgtttgtttacctgcaatgg

SEQ ID NO: 5763 - DNA, 23 bp, Homo sapiens
  source 1..23: mol_type = genomic DNA
tttcttctctgcaatttccctgg

SEQ ID NO: 5764 - DNA, 23 bp, Homo sapiens
  source 1..23: mol_type = genomic DNA
aattctatagagtaagttgcagg

SEQ ID NO: 5765 - DNA, 23 bp, Homo sapiens
  source 1..23: mol_type = genomic DNA
tagtatgaaataaagaaatacgg

SEQ ID NO: 5766 - DNA, 23 bp, Homo sapiens
  source 1..23: mol_type = genomic DNA
ttagccttcatttccatcactgg

SEQ ID NO: 5767 - DNA, 23 bp, Homo sapiens
  source 1..23: mol_type = genomic DNA
tttcagaattagttgccctatgg

SEQ ID NO: 5768 - DNA, 23 bp, Homo sapiens
  source 1..23: mol_type = genomic DNA
atacacacaggcaatcaatatgg

SEQ ID NO: 5769 - DNA, 23 bp, Homo sapiens
  source 1..23: mol_type = genomic DNA
tatttctcataaaaactcctagg

SEQ ID NO: 5770 - DNA, 23 bp, Homo sapiens
  source 1..23: mol_type = genomic DNA
cctaccttagactaggcatatgg

SEQ ID NO: 5771 - DNA, 23 bp, Homo sapiens
  source 1..23: mol_type = genomic DNA
gtaaatttaatgatgtctaaagg

SEQ ID NO: 5772 - DNA, 23 bp, Homo sapiens
  source 1..23: mol_type = genomic DNA
aagacacaaggactacgtttggg

SEQ ID NO: 5773 - DNA, 23 bp, Homo sapiens
  source 1..23: mol_type = genomic DNA
gtaacaagatctgaatgtttggg

SEQ ID NO: 5774 - DNA, 23 bp, Homo sapiens
  source 1..23: mol_type = genomic DNA
ctatgccactcttaaagccttgg

SEQ ID NO: 5775 - DNA, 23 bp, Homo sapiens
  source 1..23: mol_type = genomic DNA
tcttcattcttttcgtgtgaagg

SEQ ID NO: 5776 - DNA, 23 bp, Homo sapiens
  source 1..23: mol_type = genomic DNA
atttacaagttaacgttcactgg

SEQ ID NO: 5777 - DNA, 23 bp, Homo sapiens
  source 1..23: mol_type = genomic DNA
cttaagtatggggagggcggggg

SEQ ID NO: 5778 - DNA, 23 bp, Homo sapiens
  source 1..23: mol_type = genomic DNA
tcaatctgaaatttaacataagg

SEQ ID NO: 5779 - DNA, 23 bp, Homo sapiens
  source 1..23: mol_type = genomic DNA
aataggctgaaagctccaacagg

SEQ ID NO: 5780 - DNA, 23 bp, Homo sapiens
  source 1..23: mol_type = genomic DNA
acaaatgaatcataaggtagagg

SEQ ID NO: 5781 - DNA, 23 bp, Homo sapiens
  source 1..23: mol_type = genomic DNA
ctctcactgtcaattttgagtgg

SEQ ID NO: 5782 - DNA, 23 bp, Homo sapiens
  source 1..23: mol_type = genomic DNA
atgctaatccaaaataataaggg

SEQ ID NO: 5783 - DNA, 23 bp, Homo sapiens
  source 1..23: mol_type = genomic DNA
gtttaaacagaacaaggaattgg

SEQ ID NO: 5784 - DNA, 23 bp, Homo sapiens
  source 1..23: mol_type = genomic DNA
gtgttatgttctttttcccatgg

SEQ ID NO: 5785 - DNA, 23 bp, Homo sapiens
  source 1..23: mol_type = genomic DNA
tatttgaataaatatcataaggg

SEQ ID NO: 5786 - DNA, 23 bp, Homo sapiens
  source 1..23: mol_type = genomic DNA
aggaacaagcacgattttaaggg

SEQ ID NO: 5787 - DNA, 23 bp, Homo sapiens
  source 1..23: mol_type = genomic DNA
atatgttgttatacagtcattgg

SEQ ID NO: 5788 - DNA, 23 bp, Homo sapiens
  source 1..23: mol_type = genomic DNA
ctacggagagtacttttcatagg

SEQ ID NO: 5789 - DNA, 23 bp, Homo sapiens
  source 1..23: mol_type = genomic DNA
acagttcactgaaacttaaaggg

SEQ ID NO: 5790 - DNA, 23 bp, Homo sapiens
  source 1..23: mol_type = genomic DNA
tgagttgtgataaatgataatgg

SEQ ID NO: 5791 - DNA, 23 bp, Homo sapiens
  source 1..23: mol_type = genomic DNA
ttacattcattgtaacctcttgg

SEQ ID NO: 5792 - DNA, 23 bp, Homo sapiens
  source 1..23: mol_type = genomic DNA
ataaaaacaaaacagttagatgg

SEQ ID NO: 5793 - DNA, 23 bp, Homo sapiens
  source 1..23: mol_type = genomic DNA
gtcttagtataggggacattggg

SEQ ID NO: 5794 - DNA, 23 bp, Homo sapiens
  source 1..23: mol_type = genomic DNA
gtacatagtcactttataagagg

SEQ ID NO: 5795 - DNA, 23 bp, Homo sapiens
  source 1..23: mol_type = genomic DNA
taacttagagatataataagtgg

SEQ ID NO: 5796 - DNA, 23 bp, Homo sapiens
  source 1..23: mol_type = genomic DNA
gttttatcccaccagaaattggg

SEQ ID NO: 5797 - DNA, 23 bp, Homo sapiens
  source 1..23: mol_type = genomic DNA
cattacataatgacaaaaatggg

SEQ ID NO: 5798 - DNA, 23 bp, Homo sapiens
  source 1..23: mol_type = genomic DNA
aatgtagaagcgaaatttgaggg

SEQ ID NO: 5799 - DNA, 23 bp, Homo sapiens
  source 1..23: mol_type = genomic DNA
gctgttattcaggtgcttgaagg

SEQ ID NO: 5800 - DNA, 23 bp, Homo sapiens
  source 1..23: mol_type = genomic DNA
ttataatttacaagttcttaggg

SEQ ID NO: 5801 - DNA, 23 bp, Homo sapiens
  source 1..23: mol_type = genomic DNA
gacagtgaagactcaataacagg

SEQ ID NO: 5802 - DNA, 23 bp, Homo sapiens
  source 1..23: mol_type = genomic DNA
tcctgcctattaggaagaatggg

SEQ ID NO: 5803 - DNA, 23 bp, Homo sapiens
  source 1..23: mol_type = genomic DNA
agtatccacacacatttcattgg

SEQ ID NO: 5804 - DNA, 23 bp, Homo sapiens
  source 1..23: mol_type = genomic DNA
agtatgttatcctcaggctttgg

SEQ ID NO: 5805 - DNA, 23 bp, Homo sapiens
  source 1..23: mol_type = genomic DNA
tacaacatttgaacgtaaaacgg

SEQ ID NO: 5806 - DNA, 23 bp, Homo sapiens
  source 1..23: mol_type = genomic DNA
tccttttgcttgttctggcaggg

SEQ ID NO: 5807 - DNA, 23 bp, Homo sapiens
  source 1..23: mol_type = genomic DNA
gtagagagggatttgggctgagg

SEQ ID NO: 5808 - DNA, 23 bp, Homo sapiens
  source 1..23: mol_type = genomic DNA
gctatgacctattctcatactgg

SEQ ID NO: 5809 - DNA, 23 bp, Homo sapiens
  source 1..23: mol_type = genomic DNA
attgtaggtcccatttgtaatgg

SEQ ID NO: 5810 - DNA, 23 bp, Homo sapiens
  source 1..23: mol_type = genomic DNA
caaaaaatagagaaccttgtagg

SEQ ID NO: 5811 - DNA, 23 bp, Homo sapiens
  source 1..23: mol_type = genomic DNA
ataactttcctaaatatcctagg

SEQ ID NO: 5812 - DNA, 23 bp, Homo sapiens
  source 1..23: mol_type = genomic DNA
ccctcatatcttcttctgctggg

SEQ ID NO: 5813 - DNA, 23 bp, Homo sapiens
  source 1..23: mol_type = genomic DNA
tctgtttttgatgttgcagatgg

SEQ ID NO: 5814 - DNA, 23 bp, Homo sapiens
  source 1..23: mol_type = genomic DNA
ctttttccatatcatttcctggg

SEQ ID NO: 5815 - DNA, 23 bp, Homo sapiens
  source 1..23: mol_type = genomic DNA
atatattgtcccaactgaacagg

SEQ ID NO: 5816 - DNA, 23 bp, Homo sapiens
  source 1..23: mol_type = genomic DNA
gggatcctgtaccctgagatagg

SEQ ID NO: 5817 - DNA, 23 bp, Homo sapiens
  source 1..23: mol_type = genomic DNA
aggcacttcagcaggatataggg

SEQ ID NO: 5818 - DNA, 23 bp, Homo sapiens
  source 1..23: mol_type = genomic DNA
tttgctcaggaattatactaagg

SEQ ID NO: 5819 - DNA, 23 bp, Homo sapiens
  source 1..23: mol_type = genomic DNA
gctaacaataaaatactaatggg

SEQ ID NO: 5820 - DNA, 23 bp, Homo sapiens
  source 1..23: mol_type = genomic DNA
ggtgtagtagagaggaagatagg

SEQ ID NO: 5821 - DNA, 23 bp, Homo sapiens
  source 1..23: mol_type = genomic DNA
gactgcggcagactgttcttggg

SEQ ID NO: 5822 - DNA, 23 bp, Homo sapiens
  source 1..23: mol_type = genomic DNA
aaggttttgagcagaataaaggg

SEQ ID NO: 5823 - DNA, 23 bp, Homo sapiens
  source 1..23: mol_type = genomic DNA
tgattcatttgttattcctaggg

SEQ ID NO: 5824 - DNA, 23 bp, Homo sapiens
  source 1..23: mol_type = genomic DNA
tctccactttccgcagcaaatgg

SEQ ID NO: 5825 - DNA, 23 bp, Homo sapiens
  source 1..23: mol_type = genomic DNA
gacaagcaagagataaatatcgg

SEQ ID NO: 5826 - DNA, 23 bp, Homo sapiens
  source 1..23: mol_type = genomic DNA
ggcatgatcaaggcagttacggg

SEQ ID NO: 5827 - DNA, 23 bp, Homo sapiens
  source 1..23: mol_type = genomic DNA
ggagggactttttttggagttgg

SEQ ID NO: 5828 - DNA, 23 bp, Homo sapiens
  source 1..23: mol_type = genomic DNA
cctaatttatttctgcggcttgg

SEQ ID NO: 5829 - DNA, 23 bp, Homo sapiens
  source 1..23: mol_type = genomic DNA
aagacactgaagaaagaataggg

SEQ ID NO: 5830 - DNA, 23 bp, Homo sapiens
  source 1..23: mol_type = genomic DNA
ccttttgtccaaaattccattgg

SEQ ID NO: 5831 - DNA, 23 bp, Homo sapiens
  source 1..23: mol_type = genomic DNA
ttaaatctaatacagtcgtttgg

SEQ ID NO: 5832 - DNA, 23 bp, Homo sapiens
  source 1..23: mol_type = genomic DNA
tgtgggagtgcaagtcaataggg

SEQ ID NO: 5833 - DNA, 23 bp, Homo sapiens
  source 1..23: mol_type = genomic DNA
tgtatgacctttatacactttgg

SEQ ID NO: 5834 - DNA, 23 bp, Homo sapiens
  source 1..23: mol_type = genomic DNA
aaaaccatcatatcactcattgg

SEQ ID NO: 5835 - DNA, 23 bp, Homo sapiens
  source 1..23: mol_type = genomic DNA
ccaggcatcactgtttatgatgg

SEQ ID NO: 5836 - DNA, 23 bp, Homo sapiens
  source 1..23: mol_type = genomic DNA
tctcactgtcaattttgagtggg

SEQ ID NO: 5837 - DNA, 23 bp, Homo sapiens
  source 1..23: mol_type = genomic DNA
aattttgcatgaagcattagtgg

SEQ ID NO: 5838 - DNA, 23 bp, Homo sapiens
  source 1..23: mol_type = genomic DNA
tgataaaatggggattttagtgg

SEQ ID NO: 5839 - DNA, 23 bp, Homo sapiens
  source 1..23: mol_type = genomic DNA
ttcagattaaaatattaaatggg

SEQ ID NO: 5840 - DNA, 23 bp, Homo sapiens
  source 1..23: mol_type = genomic DNA
ttaagttcagattcaagaaaagg

SEQ ID NO: 5841 - DNA, 23 bp, Homo sapiens
  source 1..23: mol_type = genomic DNA
gctgaatattgcgacaatatagg

SEQ ID NO: 5842 - DNA, 23 bp, Homo sapiens
  source 1..23: mol_type = genomic DNA
ataatttcatagtaataagtagg

SEQ ID NO: 5843 - DNA, 23 bp, Homo sapiens
  source 1..23: mol_type = genomic DNA
actgctgtttattcaaaaagagg

SEQ ID NO: 5844 - DNA, 23 bp, Homo sapiens
  source 1..23: mol_type = genomic DNA
gtttgatgtagagaaataagagg

SEQ ID NO: 5845 - DNA, 23 bp, Homo sapiens
  source 1..23: mol_type = genomic DNA
tgtcagctcctagatcttccagg

SEQ ID NO: 5846 - DNA, 23 bp, Homo sapiens
  source 1..23: mol_type = genomic DNA
gctgcttttgagctatttgaagg

SEQ ID NO: 5847 - DNA, 23 bp, Homo sapiens
  source 1..23: mol_type = genomic DNA
ttactgctgaaattgaatatggg

SEQ ID NO: 5848 - DNA, 23 bp, Homo sapiens
  source 1..23: mol_type = genomic DNA
tatagctttagttttcaaaaggg

SEQ ID NO: 5849 - DNA, 23 bp, Homo sapiens
  source 1..23: mol_type = genomic DNA
attcaggcctgagatacatttgg

SEQ ID NO: 5850 - DNA, 23 bp, Homo sapiens
  source 1..23: mol_type = genomic DNA
tttacttcttccattcaattggg

SEQ ID NO: 5851 - DNA, 23 bp, Homo sapiens
  source 1..23: mol_type = genomic DNA
ttttgttttgattattcggttgg

SEQ ID NO: 5852 - DNA, 23 bp, Homo sapiens
  source 1..23: mol_type = genomic DNA
gataaaggcagaaatagaattgg

SEQ ID NO: 5853 - DNA, 23 bp, Homo sapiens
  source 1..23: mol_type = genomic DNA
gcagttgctcctggacagtatgg

SEQ ID NO: 5854 - DNA, 23 bp, Homo sapiens
  source 1..23: mol_type = genomic DNA
aaccttctctgttgtggtggcgg

SEQ ID NO: 5855 - DNA, 23 bp, Homo sapiens
  source 1..23: mol_type = genomic DNA
tgatccccactgaaaaaaactgg

SEQ ID NO: 5856 - DNA, 23 bp, Homo sapiens
  source 1..23: mol_type = genomic DNA
cacccagtgcatgttttcatagg

SEQ ID NO: 5857 - DNA, 23 bp, Homo sapiens
  source 1..23: mol_type = genomic DNA
gatataataaaaactattgcagg

SEQ ID NO: 5858 - DNA, 23 bp, Homo sapiens
  source 1..23: mol_type = genomic DNA
cctcctccactccaaatcttagg

SEQ ID NO: 5859 - DNA, 23 bp, Homo sapiens
  source 1..23: mol_type = genomic DNA
gatgtttttgaaataggttaagg

SEQ ID NO: 5860 - DNA, 23 bp, Homo sapiens
  source 1..23: mol_type = genomic DNA
cttctggctgtgagaggcatagg

SEQ ID NO: 5861 - DNA, 23 bp, Homo sapiens
  source 1..23: mol_type = genomic DNA
gctggactctaagttctataggg

SEQ ID NO: 5862 - DNA, 23 bp, Homo sapiens
  source 1..23: mol_type = genomic DNA
agaatatcgtctattctttgtgg

SEQ ID NO: 5863 - DNA, 23 bp, Homo sapiens
  source 1..23: mol_type = genomic DNA
ggtaatattagacgagcaaaagg

SEQ ID NO: 5864 - DNA, 23 bp, Homo sapiens
  source 1..23: mol_type = genomic DNA
agtcatcatcaaaaaacaatagg

SEQ ID NO: 5865 - DNA, 23 bp, Homo sapiens
  source 1..23: mol_type = genomic DNA
tagttcttgctatcattaagagg

SEQ ID NO: 5866 - DNA, 23 bp, Homo sapiens
  source 1..23: mol_type = genomic DNA
ctttggggacccctgctttgggg

SEQ ID NO: 5867 - DNA, 23 bp, Homo sapiens
  source 1..23: mol_type = genomic DNA
gtattgtatgaaagcttcattgg

SEQ ID NO: 5868 - DNA, 23 bp, Homo sapiens
  source 1..23: mol_type = genomic DNA
ttttgcctgcttctgtaaagtgg

SEQ ID NO: 5869 - DNA, 23 bp, Homo sapiens
  source 1..23: mol_type = genomic DNA
gacatattctagctacttgatgg

SEQ ID NO: 5870 - DNA, 23 bp, Homo sapiens
  source 1..23: mol_type = genomic DNA
caaaatccagataagcctttggg

SEQ ID NO: 5871 - DNA, 23 bp, Homo sapiens
  source 1..23: mol_type = genomic DNA
tttggtgtttccaatgtctaggg

SEQ ID NO: 5872 - DNA, 23 bp, Homo sapiens
  source 1..23: mol_type = genomic DNA
agtcatgtgccatatgtaaatgg

SEQ ID NO: 5873 - DNA, 23 bp, Homo sapiens
  source 1..23: mol_type = genomic DNA
aagttatttttactccataaggg

SEQ ID NO: 5874 - DNA, 23 bp, Homo sapiens
  source 1..23: mol_type = genomic DNA
acagagatatgctcagtgttagg

SEQ ID NO: 5875 - DNA, 23 bp, Homo sapiens
  source 1..23: mol_type = genomic DNA
ctatggggtaaaaatgcaatagg

SEQ ID NO: 5876 - DNA, 23 bp, Homo sapiens
  source 1..23: mol_type = genomic DNA
aatgattttggggctcataatgg

SEQ ID NO: 5877 - DNA, 23 bp, Homo sapiens
  source 1..23: mol_type = genomic DNA
agtaaacatatatctctgatagg

SEQ ID NO: 5878 - DNA, 23 bp, Homo sapiens
  source 1..23: mol_type = genomic DNA
ttagaatttgtttttactgtggg

SEQ ID NO: 5879 - DNA, 23 bp, Homo sapiens
  source 1..23: mol_type = genomic DNA
ggtttactgacttagatgatagg

SEQ ID NO: 5880 - DNA, 23 bp, Homo sapiens
  source 1..23: mol_type = genomic DNA
gtctttatctcaatgccattagg

SEQ ID NO: 5881 - DNA, 23 bp, Homo sapiens
  source 1..23: mol_type = genomic DNA
aggacctatgagagatactttgg

SEQ ID NO: 5882 - DNA, 23 bp, Homo sapiens
  source 1..23: mol_type = genomic DNA
acttctggctcccttccctcagg

SEQ ID NO: 5883 - DNA, 23 bp, Homo sapiens
  source 1..23: mol_type = genomic DNA
tgataacccctttagcaaactgg

SEQ ID NO: 5884 - DNA, 23 bp, Homo sapiens
  source 1..23: mol_type = genomic DNA
ggtcatatggtcccaatataggg

SEQ ID NO: 5885 - DNA, 23 bp, Homo sapiens
  source 1..23: mol_type = genomic DNA
aattccatatgcctagtctaagg

SEQ ID NO: 5886 - DNA, 23 bp, Homo sapiens
  source 1..23: mol_type = genomic DNA
acatggtttatgaaagaaatggg

SEQ ID NO: 5887 - DNA, 23 bp, Homo sapiens
  source 1..23: mol_type = genomic DNA
agatgtagacgttatctataggg

SEQ ID NO: 5888 - DNA, 23 bp, Homo sapiens
  source 1..23: mol_type = genomic DNA
tgcttccagtttaaaaaaaacgg

SEQ ID NO: 5889 - DNA, 23 bp, Homo sapiens
  source 1..23: mol_type = genomic DNA
ataagctagactattaagattgg

SEQ ID NO: 5890 - DNA, 23 bp, Homo sapiens
  source 1..23: mol_type = genomic DNA
gataaattcagcttatgttaagg

SEQ ID NO: 5891 - DNA, 23 bp, Homo sapiens
  source 1..23: mol_type = genomic DNA
gagggactgtactaatttgtagg

SEQ ID NO: 5892 - DNA, 23 bp, Homo sapiens
  source 1..23: mol_type = genomic DNA
aaaagcataggactacaaaatgg

SEQ ID NO: 5893 - DNA, 23 bp, Homo sapiens
  source 1..23: mol_type = genomic DNA
accatcgccatcattgactatgg

SEQ ID NO: 5894 - DNA, 23 bp, Homo sapiens
  source 1..23: mol_type = genomic DNA
gctaatctgttcagagtcatagg

SEQ ID NO: 5895 - DNA, 23 bp, Homo sapiens
  source 1..23: mol_type = genomic DNA
agttcccactaggaaatagtagg

SEQ ID NO: 5896 - DNA, 23 bp, Homo sapiens
  source 1..23: mol_type = genomic DNA
ggcagtgcctattcactaactgg

SEQ ID NO: 5897 - DNA, 23 bp, Homo sapiens
  source 1..23: mol_type = genomic DNA
tcatttctcttcaaagccttagg

SEQ ID NO: 5898 - DNA, 23 bp, Homo sapiens
  source 1..23: mol_type = genomic DNA
gtcctcaatcaaacactagatgg

SEQ ID NO: 5899 - DNA, 23 bp, Homo sapiens
  source 1..23: mol_type = genomic DNA
cacagaccagaaacagaaattgg

SEQ ID NO: 5900 - DNA, 23 bp, Homo sapiens
  source 1..23: mol_type = genomic DNA
gtatataagggaatcattacagg

SEQ ID NO: 5901 - DNA, 23 bp, Homo sapiens
  source 1..23: mol_type = genomic DNA
ctgaaacgtattgatccctttgg

SEQ ID NO: 5902 - DNA, 23 bp, Homo sapiens
  source 1..23: mol_type = genomic DNA
ttacatggcatccagagaacagg

SEQ ID NO: 5903 - DNA, 23 bp, Homo sapiens
  source 1..23: mol_type = genomic DNA
acacattaccaattttaaatggg

SEQ ID NO: 5904 - DNA, 23 bp, Homo sapiens
  source 1..23: mol_type = genomic DNA
tcataatatttagttgataaggg

SEQ ID NO: 5905 - DNA, 23 bp, Homo sapiens
  source 1..23: mol_type = genomic DNA
ggttggtgatctttgttgtatgg

SEQ ID NO: 5906 - DNA, 23 bp, Homo sapiens
  source 1..23: mol_type = genomic DNA
gaaagactctgtaggtcaattgg

SEQ ID NO: 5907 - DNA, 23 bp, Homo sapiens
  source 1..23: mol_type = genomic DNA
ctaacaacattagaatcattagg

SEQ ID NO: 5908 - DNA, 23 bp, Homo sapiens
  source 1..23: mol_type = genomic DNA
tgtcaatgtttccataccttggg

SEQ ID NO: 5909 - DNA, 23 bp, Homo sapiens
  source 1..23: mol_type = genomic DNA
tttttatatttgttgttagtggg

SEQ ID NO: 5910 - DNA, 23 bp, Homo sapiens
  source 1..23: mol_type = genomic DNA
ttttaatcgtggaagtttaaggg

SEQ ID NO: 5911 - DNA, 23 bp, Homo sapiens
  source 1..23: mol_type = genomic DNA
gtaaataaaatataacaaatcgg

SEQ ID NO: 5912 - DNA, 23 bp, Homo sapiens
  source 1..23: mol_type = genomic DNA
gaagacactgaagaaagaatagg

SEQ ID NO: 5913 - DNA, 23 bp, Homo sapiens
  source 1..23: mol_type = genomic DNA
gcagagtatggtttttaaaaggg

SEQ ID NO: 5914 - DNA, 23 bp, Homo sapiens
  source 1..23: mol_type = genomic DNA
ttttaatctgaagaaatccttgg

SEQ ID NO: 5915 - DNA, 23 bp, Homo sapiens
  source 1..23: mol_type = genomic DNA
tttatgtcattggttttgcctgg

SEQ ID NO: 5916 - DNA, 23 bp, Homo sapiens
  source 1..23: mol_type = genomic DNA
ggaacctaggaaataggaattgg

SEQ ID NO: 5917 - DNA, 23 bp, Homo sapiens
  source 1..23: mol_type = genomic DNA
tttctactctaaattgagtcagg

SEQ ID NO: 5918 - DNA, 23 bp, Homo sapiens
  source 1..23: mol_type = genomic DNA
gatctggcttaataatatatagg

SEQ ID NO: 5919 - DNA, 23 bp, Homo sapiens
  source 1..23: mol_type = genomic DNA
atagatttctggagtaaaacagg

SEQ ID NO: 5920 - DNA, 23 bp, Homo sapiens
  source 1..23: mol_type = genomic DNA
ataaccatcttataaatattcgg

SEQ ID NO: 5921 - DNA, 23 bp, Homo sapiens
  source 1..23: mol_type = genomic DNA
aatagagtaacatacatattggg

SEQ ID NO: 5922 - DNA, 23 bp, Homo sapiens
  source 1..23: mol_type = genomic DNA
taatgtagcgaagggtactatgg

SEQ ID NO: 5923 - DNA, 23 bp, Homo sapiens
  source 1..23: mol_type = genomic DNA
gaagatctatttcaacttgcggg

SEQ ID NO: 5924 - DNA, 23 bp, Homo sapiens
  source 1..23: mol_type = genomic DNA
gctgttgtaaaggagattacagg

SEQ ID NO: 5925 - DNA, 23 bp, Homo sapiens
  source 1..23: mol_type = genomic DNA
tcttaactaatcacattgcttgg

SEQ ID NO: 5926 - DNA, 23 bp, Homo sapiens
  source 1..23: mol_type = genomic DNA
ctattcagaagaagaaaaaatgg

SEQ ID NO: 5927 - DNA, 23 bp, Homo sapiens
  source 1..23: mol_type = genomic DNA
ttagcatattaactcctttgagg

SEQ ID NO: 5928 - DNA, 23 bp, Homo sapiens
  source 1..23: mol_type = genomic DNA
gctttacattataaattgtatgg

SEQ ID NO: 5929 - DNA, 23 bp, Homo sapiens
  source 1..23: mol_type = genomic DNA
aataagtaggcgaaaccatttgg

SEQ ID NO: 5930 - DNA, 23 bp, Homo sapiens
  source 1..23: mol_type = genomic DNA
tccaggtgataacatttaacagg

SEQ ID NO: 5931 - DNA, 23 bp, Homo sapiens
  source 1..23: mol_type = genomic DNA
tattctgttccttagcctaaagg

SEQ ID NO: 5932 - DNA, 23 bp, Homo sapiens
  source 1..23: mol_type = genomic DNA
ttgttttgctttactttggtagg

SEQ ID NO: 5933 - DNA, 23 bp, Homo sapiens
  source 1..23: mol_type = genomic DNA
gaacatttatatccctaataggg

SEQ ID NO: 5934 - DNA, 23 bp, Homo sapiens
  source 1..23: mol_type = genomic DNA
tcaataggattttctcagaatgg

SEQ ID NO: 5935 - DNA, 23 bp, Homo sapiens
  source 1..23: mol_type = genomic DNA
ccaaaagatgaaaatatgtttgg

SEQ ID NO: 5936 - DNA, 23 bp, Homo sapiens
  source 1..23: mol_type = genomic DNA
gcaagtacttgatttaaattggg

SEQ ID NO: 5937 - DNA, 23 bp, Homo sapiens
  source 1..23: mol_type = genomic DNA
tctctttctgcgaggacctatgg

SEQ ID NO: 5938 - DNA, 23 bp, Homo sapiens
  source 1..23: mol_type = genomic DNA
tgacagatattgtgatttaaggg

SEQ ID NO: 5939 - DNA, 23 bp, Homo sapiens
  source 1..23: mol_type = genomic DNA
agagaagagaggagtcctatagg

SEQ ID NO: 5940 - DNA, 23 bp, Homo sapiens
  source 1..23: mol_type = genomic DNA
agtctgtctttagcactaaccgg

SEQ ID NO: 5941 - DNA, 23 bp, Homo sapiens
  source 1..23: mol_type = genomic DNA
ttgaaaggaattctgcagatagg

SEQ ID NO: 5942 - DNA, 23 bp, Homo sapiens
  source 1..23: mol_type = genomic DNA
tcttaagtatggggagggcgggg

SEQ ID NO: 5943 - DNA, 23 bp, Homo sapiens
  source 1..23: mol_type = genomic DNA
gcttactgtctactttttcaggg

SEQ ID NO: 5944 - DNA, 23 bp, Homo sapiens
  source 1..23: mol_type = genomic DNA
aactgtatgaaagagcctattgg

SEQ ID NO: 5945 - DNA, 23 bp, Homo sapiens
  source 1..23: mol_type = genomic DNA
tggagtcttgttgcattcctggg

SEQ ID NO: 5946 - DNA, 23 bp, Homo sapiens
  source 1..23: mol_type = genomic DNA
ttagacacttttgaagaagatgg

SEQ ID NO: 5947 - DNA, 23 bp, Homo sapiens
  source 1..23: mol_type = genomic DNA
gaccagctcccagaaaaataagg

SEQ ID NO: 5948 - DNA, 23 bp, Homo sapiens
  source 1..23: mol_type = genomic DNA
agtagaatagaaagatatatagg

SEQ ID NO: 5949 - DNA, 23 bp, Homo sapiens
  source 1..23: mol_type = genomic DNA
cactgtttatgatggattaaggg

SEQ ID NO: 5950 - DNA, 23 bp, Homo sapiens
  source 1..23: mol_type = genomic DNA
attcattttaaaactcttagtgg

SEQ ID NO: 5951 - DNA, 23 bp, Homo sapiens
  source 1..23: mol_type = genomic DNA
ggcttcttctttgggctgtaggg

SEQ ID NO: 5952 - DNA, 23 bp, Homo sapiens
  source 1..23: mol_type = genomic DNA
tcacaaagtttcccagaaacagg

SEQ ID NO: 5953 - DNA, 23 bp, Homo sapiens
  source 1..23: mol_type = genomic DNA
gtgtgcccattcttcctaatagg

SEQ ID NO: 5954 - DNA, 23 bp, Homo sapiens
  source 1..23: mol_type = genomic DNA
agagggtgcagagagctaaaagg

SEQ ID NO: 5955 - DNA, 23 bp, Homo sapiens
  source 1..23: mol_type = genomic DNA
cctcctgcacaccaaagtttagg

SEQ ID NO: 5956 - DNA, 23 bp, Homo sapiens
  source 1..23: mol_type = genomic DNA
gcagggacaatgatgcaaattgg

SEQ ID NO: 5957 - DNA, 23 bp, Homo sapiens
  source 1..23: mol_type = genomic DNA
ctgcaagacaagcaaaatatagg

SEQ ID NO: 5958 - DNA, 23 bp, Homo sapiens
  source 1..23: mol_type = genomic DNA
cttttttcatccgtcatcttcgg

SEQ ID NO: 5959 - DNA, 23 bp, Homo sapiens
  source 1..23: mol_type = genomic DNA
aatgagattttgtaaccataagg

SEQ ID NO: 5960 - DNA, 23 bp, Homo sapiens
  source 1..23: mol_type = genomic DNA
ctgcttttcaggaagtaacttgg

SEQ ID NO: 5961 - DNA, 23 bp, Homo sapiens
  source 1..23: mol_type = genomic DNA
agaataggatggtttgtaaaggg

SEQ ID NO: 5962 - DNA, 23 bp, Homo sapiens
  source 1..23: mol_type = genomic DNA
tttttttttaatcagccaatagg

SEQ ID NO: 5963 - DNA, 23 bp, Homo sapiens
  source 1..23: mol_type = genomic DNA
gcaccaatcttttaaaaagttgg

SEQ ID NO: 5964 - DNA, 23 bp, Homo sapiens
  source 1..23: mol_type = genomic DNA
gttctttctttggggatatgagg

SEQ ID NO: 5965 - DNA, 23 bp, Homo sapiens
  source 1..23: mol_type = genomic DNA
tttctcctaaaacatcttcctgg

SEQ ID NO: 5966 - DNA, 23 bp, Homo sapiens
  source 1..23: mol_type = genomic DNA
ggagagtgagaacgaggatgagg

SEQ ID NO: 5967 - DNA, 23 bp, Homo sapiens
  source 1..23: mol_type = genomic DNA
cttcctgagcttgaaatgaatgg

SEQ ID NO: 5968 - DNA, 23 bp, Homo sapiens
  source 1..23: mol_type = genomic DNA
gctgaggttgagagctttcaagg

SEQ ID NO: 5969 - DNA, 23 bp, Homo sapiens
  source 1..23: mol_type = genomic DNA
agaagttcaaaacaaggctttgg

SEQ ID NO: 5970 - DNA, 23 bp, Homo sapiens
  source 1..23: mol_type = genomic DNA
aggaaaattccaaagttaaaggg

SEQ ID NO: 5971 - DNA, 23 bp, Homo sapiens
  source 1..23: mol_type = genomic DNA
gaataatctttccaaataaaggg

SEQ ID NO: 5972 - DNA, 23 bp, Homo sapiens
  source 1..23: mol_type = genomic DNA
cctgatgcttttgcaataaaggg

SEQ ID NO: 5973 - DNA, 23 bp, Homo sapiens
  source 1..23: mol_type = genomic DNA
agccacatatagttgacatttgg

SEQ ID NO: 5974 - DNA, 23 bp, Homo sapiens
  source 1..23: mol_type = genomic DNA
tactggttcctgaactcaattgg

SEQ ID NO: 5975 - DNA, 23 bp, Homo sapiens
  source 1..23: mol_type = genomic DNA
cagctacaagacaaccttgtagg

SEQ ID NO: 5976 - DNA, 23 bp, Homo sapiens
  source 1..23: mol_type = genomic DNA
gcactgactcatggtttaaaggg

SEQ ID NO: 5977 - DNA, 23 bp, Homo sapiens
  source 1..23: mol_type = genomic DNA
atgaccttctgattacaaaaagg

SEQ ID NO: 5978 - DNA, 23 bp, Homo sapiens
  source 1..23: mol_type = genomic DNA
taggtacctgacatttcaatagg

SEQ ID NO: 5979 - DNA, 23 bp, Homo sapiens
  source 1..23: mol_type = genomic DNA
cttttaatccagatacttagtgg

SEQ ID NO: 5980 - DNA, 23 bp, Homo sapiens
  source 1..23: mol_type = genomic DNA
gatgcagaatcagtcttaagagg

SEQ ID NO: 5981 - DNA, 23 bp, Homo sapiens
  source 1..23: mol_type = genomic DNA
ttaaaacaatgccattatagtgg

SEQ ID NO: 5982 - DNA, 23 bp, Homo sapiens
  source 1..23: mol_type = genomic DNA
ttcttaccaaagaaacaaaaagg

SEQ ID NO: 5983 - DNA, 23 bp, Homo sapiens
  source 1..23: mol_type = genomic DNA
ctgcccaccaagaagctataagg

SEQ ID NO: 5984 - DNA, 23 bp, Homo sapiens
  source 1..23: mol_type = genomic DNA
tgatagctttgattttcaatagg

SEQ ID NO: 5985 - DNA, 23 bp, Homo sapiens
  source 1..23: mol_type = genomic DNA
tgtaatgtccttaactcttaggg

SEQ ID NO: 5986 - DNA, 23 bp, Homo sapiens
  source 1..23: mol_type = genomic DNA
atgctttgtgtgttgttgctagg

SEQ ID NO: 5987 - DNA, 23 bp, Homo sapiens
  source 1..23: mol_type = genomic DNA
gaattaatcttatctagaaatgg

SEQ ID NO: 5988 - DNA, 23 bp, Homo sapiens
  source 1..23: mol_type = genomic DNA
tacttctgtgtactttttgtggg

SEQ ID NO: 5989 - DNA, 23 bp, Homo sapiens
  source 1..23: mol_type = genomic DNA
gtttaaaactgtagtataaaggg

SEQ ID NO: 5990 - DNA, 23 bp, Homo sapiens
  source 1..23: mol_type = genomic DNA
tttatagccctttcttttgaggg

SEQ ID NO: 5991 - DNA, 23 bp, Homo sapiens
  source 1..23: mol_type = genomic DNA
tattaatattcccaattgaatgg

SEQ ID NO: 5992 - DNA, 23 bp, Homo sapiens
  source 1..23: mol_type = genomic DNA
ctgtgggagtgcaagtcaatagg

SEQ ID NO: 5993 - DNA, 23 bp, Homo sapiens
  source 1..23: mol_type = genomic DNA
aggaggctagctaacataatagg

SEQ ID NO: 5994 - DNA, 23 bp, Homo sapiens
  source 1..23: mol_type = genomic DNA
attggcatacagagtgtaatagg

SEQ ID NO: 5995 - DNA, 23 bp, Homo sapiens
  source 1..23: mol_type = genomic DNA
ggttgtctcagcacaacatttgg

SEQ ID NO: 5996 - DNA, 23 bp, Homo sapiens
  source 1..23: mol_type = genomic DNA
agtggtatggtaccataaaaagg

SEQ ID NO: 5997 - DNA, 23 bp, Homo sapiens
  source 1..23: mol_type = genomic DNA
ataaatacttagtgtccaatagg

SEQ ID NO: 5998 - DNA, 23 bp, Homo sapiens
  source 1..23: mol_type = genomic DNA
tattaattatttgaatgctttgg

SEQ ID NO: 5999 - DNA, 23 bp, Homo sapiens
  source 1..23: mol_type = genomic DNA
ggatattaacattttttaaaggg

SEQ ID NO: 6000 - DNA, 23 bp, Homo sapiens
  source 1..23: mol_type = genomic DNA
tgaatgagaaaggtatcatttgg

SEQ ID NO: 6001 - DNA, 23 bp, Homo sapiens
  source 1..23: mol_type = genomic DNA
ctcaatgtcttcctaaactttgg

SEQ ID NO: 6002 - DNA, 23 bp, Homo sapiens
  source 1..23: mol_type = genomic DNA
actaaggaaaacaggctataggg

SEQ ID NO: 6003 - DNA, 23 bp, Homo sapiens
  source 1..23: mol_type = genomic DNA
tatagtttataggctaataatgg

SEQ ID NO: 6004 - DNA, 23 bp, Homo sapiens
  source 1..23: mol_type = genomic DNA
ctaccttcttggcatcaaacagg

SEQ ID NO: 6005 - DNA, 23 bp, Homo sapiens
  source 1..23: mol_type = genomic DNA
tttgtttcctctactgcaaatgg

SEQ ID NO: 6006 - DNA, 23 bp, Homo sapiens
  source 1..23: mol_type = genomic DNA
attcatttcccaaggctcattgg

SEQ ID NO: 6007 - DNA, 23 bp, Homo sapiens
  source 1..23: mol_type = genomic DNA
aatcatccatgtaggacaatagg

SEQ ID NO: 6008 - DNA, 23 bp, Homo sapiens
  source 1..23: mol_type = genomic DNA
gagacatcaaatctagataatgg

SEQ ID NO: 6009 - DNA, 23 bp, Homo sapiens
  source 1..23: mol_type = genomic DNA
aaagcagtacatatgcaaaaagg

SEQ ID NO: 6010 - DNA, 23 bp, Homo sapiens
  source 1..23: mol_type = genomic DNA
taaaaaataaaagagctaaaagg

SEQ ID NO: 6011 - DNA, 23 bp, Homo sapiens
  source 1..23: mol_type = genomic DNA
tttctttgtggaaggtcatatgg

SEQ ID NO: 6012 - DNA, 23 bp, Homo sapiens
  source 1..23: mol_type = genomic DNA
tagtattctgccaaaataaaggg

SEQ ID NO: 6013 - DNA, 23 bp, Homo sapiens
  source 1..23: mol_type = genomic DNA
ataatcttttccagttcaacagg

SEQ ID NO: 6014 - DNA, 23 bp, Homo sapiens
  source 1..23: mol_type = genomic DNA
tatgaggtagagagggatttggg

SEQ ID NO: 6015 - DNA, 23 bp, Homo sapiens
  source 1..23: mol_type = genomic DNA
gtattgttcaatcattttgcagg

SEQ ID NO: 6016 - DNA, 23 bp, Homo sapiens
  source 1..23: mol_type = genomic DNA
cattccaattcctatttcctagg

SEQ ID NO: 6017 - DNA, 23 bp, Homo sapiens
  source 1..23: mol_type = genomic DNA
gctaaaacccctcttggccttgg

SEQ ID NO: 6018 - DNA, 23 bp, Homo sapiens
  source 1..23: mol_type = genomic DNA
aattgaatggaagaagtaaaagg

SEQ ID NO: 6019 - DNA, 23 bp, Homo sapiens
  source 1..23: mol_type = genomic DNA
gtggcttgctcacagtaaatagg

SEQ ID NO: 6020 - DNA, 23 bp, Homo sapiens
  source 1..23: mol_type = genomic DNA
tcacagctagtaatgtaaaatgg

SEQ ID NO: 6021 - DNA, 23 bp, Homo sapiens
  source 1..23: mol_type = genomic DNA
ttacacccctagggtataatagg

SEQ ID NO: 6022 - DNA, 23 bp, Homo sapiens
  source 1..23: mol_type = genomic DNA
tagcaacctttaaatttaaaggg

SEQ ID NO: 6023 - DNA, 23 bp, Homo sapiens
  source 1..23: mol_type = genomic DNA
atagtcttctcaattctatctgg

SEQ ID NO: 6024 - DNA, 23 bp, Homo sapiens
  source 1..23: mol_type = genomic DNA
gttaagaagccttagttcaatgg

SEQ ID NO: 6025 - DNA, 23 bp, Homo sapiens
  source 1..23: mol_type = genomic DNA
cattttatagctttatagatagg

SEQ ID NO: 6026 - DNA, 23 bp, Homo sapiens
  source 1..23: mol_type = genomic DNA
gaattacccaaaaatataaaagg

SEQ ID NO: 6027 - DNA, 23 bp, Homo sapiens
  source 1..23: mol_type = genomic DNA
attgctatagttaagagtttggg

SEQ ID NO: 6028 - DNA, 23 bp, Homo sapiens
  source 1..23: mol_type = genomic DNA
gcctcctctttgaataaatcagg

SEQ ID NO: 6029 - DNA, 23 bp, Homo sapiens
  source 1..23: mol_type = genomic DNA
atcagagtcccggtagaaactgg

SEQ ID NO: 6030 - DNA, 23 bp, Homo sapiens
  source 1..23: mol_type = genomic DNA
gttgtcttggatacattaaatgg

SEQ ID NO: 6031 - DNA, 23 bp, Homo sapiens
  source 1..23: mol_type = genomic DNA
tttgtctctaaataaggtttagg

SEQ ID NO: 6032 - DNA, 23 bp, Homo sapiens
  source 1..23: mol_type = genomic DNA
tgttttataattctccaataggg

SEQ ID NO: 6033 - DNA, 23 bp, Homo sapiens
  source 1..23: mol_type = genomic DNA
tgtttgagaaaaaattttatggg

SEQ ID NO: 6034 - DNA, 23 bp, Homo sapiens
  source 1..23: mol_type = genomic DNA
catggaagactcaagttatacgg

SEQ ID NO: 6035 - DNA, 23 bp, Homo sapiens
  source 1..23: mol_type = genomic DNA
tcatttccagaaagacaatatgg

SEQ ID NO: 6036 - DNA, 23 bp, Homo sapiens
  source 1..23: mol_type = genomic DNA
tatagtatctggaagcaaatagg

SEQ ID NO: 6037 - DNA, 23 bp, Homo sapiens
  source 1..23: mol_type = genomic DNA
gggctcctgacgcttcttgcagg

SEQ ID NO: 6038 - DNA, 23 bp, Homo sapiens
  source 1..23: mol_type = genomic DNA
taactggtacgtctccttatagg

SEQ ID NO: 6039 - DNA, 23 bp, Homo sapiens
  source 1..23: mol_type = genomic DNA
cagtttatctttccagtaagagg

SEQ ID NO: 6040 - DNA, 23 bp, Homo sapiens
  source 1..23: mol_type = genomic DNA
ataaaattgctcctaattgtagg

SEQ ID NO: 6041 - DNA, 23 bp, Homo sapiens
  source 1..23: mol_type = genomic DNA
ggggcatctcagtcctaaattgg

SEQ ID NO: 6042 - DNA, 23 bp, Homo sapiens
  source 1..23: mol_type = genomic DNA
ttttagagctttcttcataaagg

SEQ ID NO: 6043 - DNA, 23 bp, Homo sapiens
  source 1..23: mol_type = genomic DNA
cttttttcctattatttactggg

SEQ ID NO: 6044 - DNA, 23 bp, Homo sapiens
  source 1..23: mol_type = genomic DNA
gagagggagtaaaggattatagg

SEQ ID NO: 6045 - DNA, 23 bp, Homo sapiens
  source 1..23: mol_type = genomic DNA
cagtctcaggacaagtagatagg

SEQ ID NO: 6046 - DNA, 23 bp, Homo sapiens
  source 1..23: mol_type = genomic DNA
ttactcatcaccctgttctctgg

SEQ ID NO: 6047 - DNA, 23 bp, Homo sapiens
  source 1..23: mol_type = genomic DNA
tcattgaattaatcactaatagg

SEQ ID NO: 6048 - DNA, 23 bp, Homo sapiens
  source 1..23: mol_type = genomic DNA
ttgcagctcctcatatttgatgg

SEQ ID NO: 6049 - DNA, 23 bp, Homo sapiens
  source 1..23: mol_type = genomic DNA
tcatttcctgcctacctgattgg

SEQ ID NO: 6050 - DNA, 23 bp, Homo sapiens
  source 1..23: mol_type = genomic DNA
tttttattatatctgcactatgg

SEQ ID NO: 6051 - DNA, 23 bp, Homo sapiens
  source 1..23: mol_type = genomic DNA
tccatgagaaccaaaactattgg

SEQ ID NO: 6052 - DNA, 23 bp, Homo sapiens
  source 1..23: mol_type = genomic DNA
ggactcttctcatccaattccgg

SEQ ID NO: 6053 - DNA, 23 bp, Homo sapiens
  source 1..23: mol_type = genomic DNA
ggagcacagccttttgaaactgg

SEQ ID NO: 6054 - DNA, 23 bp, Homo sapiens
  source 1..23: mol_type = genomic DNA
attgttgtctgatttattaccgg

SEQ ID NO: 6055 - DNA, 23 bp, Homo sapiens
  source 1..23: mol_type = genomic DNA
tggccctacagctaagaaaatgg

SEQ ID NO: 6056 - DNA, 23 bp, Homo sapiens
  source 1..23: mol_type = genomic DNA
atatctctagtctctacttctgg

SEQ ID NO: 6057 - DNA, 23 bp, Homo sapiens
  source 1..23: mol_type = genomic DNA
tgaagaagatgggaatttagagg

SEQ ID NO: 6058 - DNA, 23 bp, Homo sapiens
  source 1..23: mol_type = genomic DNA
tctgaaatcatatttcgatttgg

SEQ ID NO: 6059 - DNA, 23 bp, Homo sapiens
  source 1..23: mol_type = genomic DNA
atcttacatgagatacttagagg

SEQ ID NO: 6060 - DNA, 23 bp, Homo sapiens
  source 1..23: mol_type = genomic DNA
cttgtactatgaaggatacttgg

SEQ ID NO: 6061 - DNA, 23 bp, Homo sapiens
  source 1..23: mol_type = genomic DNA
gttttgtttttattccaaatagg

SEQ ID NO: 6062 - DNA, 23 bp, Homo sapiens
  source 1..23: mol_type = genomic DNA
gctgagacaacctacttaaatgg

SEQ ID NO: 6063 - DNA, 23 bp, Homo sapiens
  source 1..23: mol_type = genomic DNA
ttaattgttgaaacctataaagg

SEQ ID NO: 6064 - DNA, 23 bp, Homo sapiens
  source 1..23: mol_type = genomic DNA
gtattattcttccacataatggg

SEQ ID NO: 6065 - DNA, 23 bp, Homo sapiens
  source 1..23: mol_type = genomic DNA
gcagtggcagactagcttttggg

SEQ ID NO: 6066 - DNA, 23 bp, Homo sapiens
  source 1..23: mol_type = genomic DNA
ttgtctcctgaaataataatagg

SEQ ID NO: 6067 - DNA, 23 bp, Homo sapiens
  source 1..23: mol_type = genomic DNA
atagacatagagacctaaaatgg

SEQ ID NO: 6068 - DNA, 23 bp, Homo sapiens
  source 1..23: mol_type = genomic DNA
tcttaaagccttgggtttaaggg

SEQ ID NO: 6069 - DNA, 23 bp, Homo sapiens
  source 1..23: mol_type = genomic DNA
tcccatgtccccccaactttggg

SEQ ID NO: 6070 - DNA, 23 bp, Homo sapiens
  source 1..23: mol_type = genomic DNA
tcttgacaattccttttagaagg

SEQ ID NO: 6071 - DNA, 23 bp, Homo sapiens
  source 1..23: mol_type = genomic DNA
ttcaaggtatgatcttaaaaagg

SEQ ID NO: 6072 - DNA, 23 bp, Homo sapiens
  source 1..23: mol_type = genomic DNA
ttacttttgtaatttaataaggg

SEQ ID NO: 6073 - DNA, 23 bp, Homo sapiens
  source 1..23: mol_type = genomic DNA
atagctcttagtaaatagtatgg

SEQ ID NO: 6074 - DNA, 23 bp, Homo sapiens
  source 1..23: mol_type = genomic DNA
ccaaaatgcaaccattgtttagg

SEQ ID NO: 6075 - DNA, 23 bp, Homo sapiens
  source 1..23: mol_type = genomic DNA
gctttgatttctatattaacagg

SEQ ID NO: 6076 - DNA, 23 bp, Homo sapiens
  source 1..23: mol_type = genomic DNA
ctagtgagatgctcattaactgg

SEQ ID NO: 6077 - DNA, 23 bp, Homo sapiens
  source 1..23: mol_type = genomic DNA
cctatagattagaaaaaaatcgg

SEQ ID NO: 6078 - DNA, 23 bp, Homo sapiens
  source 1..23: mol_type = genomic DNA
ccagttttagtaattgtataggg

SEQ ID NO: 6079 - DNA, 23 bp, Homo sapiens
  source 1..23: mol_type = genomic DNA
ggtcatgtcaaactacttactgg

SEQ ID NO: 6080 - DNA, 23 bp, Homo sapiens
  source 1..23: mol_type = genomic DNA
aatcaatcggccaagcaaaatgg

SEQ ID NO: 6081 - DNA, 23 bp, Homo sapiens
  source 1..23: mol_type = genomic DNA
tgtgttctctaactatgattagg

SEQ ID NO: 6082 - DNA, 23 bp, Homo sapiens
  source 1..23: mol_type = genomic DNA
tttgatatcctcagtaactatgg

SEQ ID NO: 6083 - DNA, 23 bp, Homo sapiens
  source 1..23: mol_type = genomic DNA
gcaaagaaaatattcctaaaagg

SEQ ID NO: 6084 - DNA, 23 bp, Homo sapiens
  source 1..23: mol_type = genomic DNA
tcaagactagtcttagtataggg

SEQ ID NO: 6085 - DNA, 23 bp, Homo sapiens
  source 1..23: mol_type = genomic DNA
ccaagccgcagaaataaattagg

SEQ ID NO: 6086 - DNA, 23 bp, Homo sapiens
  source 1..23: mol_type = genomic DNA
ggattatatgaataatgctttgg

SEQ ID NO: 6087 - DNA, 23 bp, Homo sapiens
  source 1..23: mol_type = genomic DNA
tctcagacattacaaactttagg

SEQ ID NO: 6088 - DNA, 23 bp, Homo sapiens
  source 1..23: mol_type = genomic DNA
gcctgactatcgtaaatttaggg

SEQ ID NO: 6089 - DNA, 23 bp, Homo sapiens
  source 1..23: mol_type = genomic DNA
tatttcccaaattatcctatagg

SEQ ID NO: 6090 - DNA, 23 bp, Homo sapiens
  source 1..23: mol_type = genomic DNA
atagtattctgccaaaataaagg

SEQ ID NO: 6091 - DNA, 23 bp, Homo sapiens
  source 1..23: mol_type = genomic DNA
gggaagactaattaaaaaaatgg

SEQ ID NO: 6092 - DNA, 23 bp, Homo sapiens
  source 1..23: mol_type = genomic DNA
gaagaaacccagtaaataatagg

SEQ ID NO: 6093 - DNA, 23 bp, Homo sapiens
  source 1..23: mol_type = genomic DNA
ttagtattaccggttgtctaagg

SEQ ID NO: 6094 - DNA, 23 bp, Homo sapiens
  source 1..23: mol_type = genomic DNA
aatgtattcttaacaagctttgg

SEQ ID NO: 6095 - DNA, 23 bp, Homo sapiens
  source 1..23: mol_type = genomic DNA
gtatacacgaggctttttaaagg

SEQ ID NO: 6096 - DNA, 23 bp, Homo sapiens
  source 1..23: mol_type = genomic DNA
ctttatctatgctttgctatagg

SEQ ID NO: 6097 - DNA, 23 bp, Homo sapiens
  source 1..23: mol_type = genomic DNA
tctgtgccttgattaaaaaaagg

SEQ ID NO: 6098 - DNA, 23 bp, Homo sapiens
  source 1..23: mol_type = genomic DNA
tttctgttgccaatttataatgg

SEQ ID NO: 6099 - DNA, 23 bp, Homo sapiens
  source 1..23: mol_type = genomic DNA
gctacggaagggatatttaaagg

SEQ ID NO: 6100 - DNA, 23 bp, Homo sapiens
  source 1..23: mol_type = genomic DNA
gatctcctagtggattgttttgg

SEQ ID NO: 6101 - DNA, 23 bp, Homo sapiens
  source 1..23: mol_type = genomic DNA
ttgcccatcgttatgtttagtgg

SEQ ID NO: 6102 - DNA, 23 bp, Homo sapiens
  source 1..23: mol_type = genomic DNA
tttttggtacgctttcaaactgg

SEQ ID NO: 6103 - DNA, 23 bp, Homo sapiens
  source 1..23: mol_type = genomic DNA
attgattctcaactggaaaaagg

SEQ ID NO: 6104 - DNA, 23 bp, Homo sapiens
  source 1..23: mol_type = genomic DNA
cgaagatgacggatgaaaaaagg

SEQ ID NO: 6105 - DNA, 23 bp, Homo sapiens
  source 1..23: mol_type = genomic DNA
tcttatttcagtgaactaaaagg

SEQ ID NO: 6106 - DNA, 23 bp, Homo sapiens
  source 1..23: mol_type = genomic DNA
agtttccccttgctgcttcatgg

SEQ ID NO: 6107 - DNA, 23 bp, Homo sapiens
  source 1..23: mol_type = genomic DNA
cataaagttggaccactaaaagg

SEQ ID NO: 6108 - DNA, 23 bp, Homo sapiens
  source 1..23: mol_type = genomic DNA
ggtggaggatgggaataattagg

SEQ ID NO: 6109 - DNA, 23 bp, Homo sapiens
  source 1..23: mol_type = genomic DNA
aatcatatgtagtcattctatgg

SEQ ID NO: 6110 - DNA, 23 bp, Homo sapiens
  source 1..23: mol_type = genomic DNA
atattttttccctttaactttgg

SEQ ID NO: 6111 - DNA, 23 bp, Homo sapiens
  source 1..23: mol_type = genomic DNA
gcagaggttgtctaaccttttgg

SEQ ID NO: 6112 - DNA, 23 bp, Homo sapiens
  source 1..23: mol_type = genomic DNA
gatagaggtgagaaaggttctgg

SEQ ID NO: 6113 - DNA, 23 bp, Homo sapiens
  source 1..23: mol_type = genomic DNA
gaattattagacacaaaaattgg

SEQ ID NO: 6114 - DNA, 23 bp, Homo sapiens
  source 1..23: mol_type = genomic DNA
gacctaccccctaagctttaggg

SEQ ID NO: 6115 - DNA, 23 bp, Homo sapiens
  source 1..23: mol_type = genomic DNA
ggtttagctcgctagctaacagg

SEQ ID NO: 6116 - DNA, 23 bp, Homo sapiens
  source 1..23: mol_type = genomic DNA
ctaattgttgttaaattgattgg

SEQ ID NO: 6117 - DNA, 23 bp, Homo sapiens
  source 1..23: mol_type = genomic DNA
gtgcaaacagttatatttaatgg

SEQ ID NO: 6118 - DNA, 23 bp, Homo sapiens
  source 1..23: mol_type = genomic DNA
ctaggggattaatattaataagg

SEQ ID NO: 6119 - DNA, 23 bp, Homo sapiens
  source 1..23: mol_type = genomic DNA
aattagatgatgagacaaaatgg

SEQ ID NO: 6120 - DNA, 23 bp, Homo sapiens
  source 1..23: mol_type = genomic DNA
gcttgactatcatcacattcagg

SEQ ID NO: 6121 - DNA, 23 bp, Homo sapiens
  source 1..23: mol_type = genomic DNA
tgaagtacccgggcatttacagg

SEQ ID NO: 6122 - DNA, 23 bp, Homo sapiens
  source 1..23: mol_type = genomic DNA
ttacaaaatacaattccttatgg

SEQ ID NO: 6123 - DNA, 23 bp, Homo sapiens
  source 1..23: mol_type = genomic DNA
ttccatttaatgcttactaatgg

SEQ ID NO: 6124 - DNA, 23 bp, Homo sapiens
  source 1..23: mol_type = genomic DNA
accttactatatacatataatgg

SEQ ID NO: 6125 - DNA, 23 bp, Homo sapiens
  source 1..23: mol_type = genomic DNA
ccttccagaaatcactaaaatgg

SEQ ID NO: 6126 - DNA, 23 bp, Homo sapiens
  source 1..23: mol_type = genomic DNA
ggttttacatagatctaaaatgg

SEQ ID NO: 6127 - DNA, 23 bp, Homo sapiens
  source 1..23: mol_type = genomic DNA
tctatagcaaatgaaaaaaaagg

SEQ ID NO: 6128 - DNA, 23 bp, Homo sapiens
  source 1..23: mol_type = genomic DNA
tgttggagctttcagcctattgg

SEQ ID NO: 6129 - DNA, 23 bp, Homo sapiens
  source 1..23: mol_type = genomic DNA
ttaagcctgtttaccattgcagg

SEQ ID NO: 6130 - DNA, 23 bp, Homo sapiens
  source 1..23: mol_type = genomic DNA
attctcatataacatgttttcgg

SEQ ID NO: 6131 - DNA, 23 bp, Homo sapiens
  source 1..23: mol_type = genomic DNA
aaaacttgtcactatcaaaatgg

SEQ ID NO: 6132 - DNA, 23 bp, Homo sapiens
  source 1..23: mol_type = genomic DNA
atatctattgaagatataattgg

SEQ ID NO: 6133 - DNA, 23 bp, Homo sapiens
  source 1..23: mol_type = genomic DNA
tgaaaagtaggccagaaatttgg

SEQ ID NO: 6134 - DNA, 23 bp, Homo sapiens
  source 1..23: mol_type = genomic DNA
gtgaccactcgaacatttacagg

SEQ ID NO: 6135 - DNA, 23 bp, Homo sapiens
  source 1..23: mol_type = genomic DNA
aataaattcatctaataaaaagg

SEQ ID NO: 6136 - DNA, 23 bp, Homo sapiens
  source 1..23: mol_type = genomic DNA
ttgtatataaaaagttaaatagg

SEQ ID NO: 6137 - DNA, 23 bp, Homo sapiens
  source 1..23: mol_type = genomic DNA
ctacaatgtgactttctaaatgg

SEQ ID NO: 6138 - DNA, 23 bp, Homo sapiens
  source 1..23: mol_type = genomic DNA
ctcattctcctactactctttgg

SEQ ID NO: 6139 - DNA, 23 bp, Homo sapiens
  source 1..23: mol_type = genomic DNA
tccatactatacacataatatgg

SEQ ID NO: 6140 - DNA, 23 bp, Homo sapiens
  source 1..23: mol_type = genomic DNA
gtttttggttaattgataaatgg

SEQ ID NO: 6141 - DNA, 23 bp, Homo sapiens
  source 1..23: mol_type = genomic DNA
tgtgcattcgaactttaaatagg

SEQ ID NO: 6142 - DNA, 23 bp, Homo sapiens
  source 1..23: mol_type = genomic DNA
gcagtagttgacattaaaaatgg

SEQ ID NO: 6143 - DNA, 23 bp, Homo sapiens
  source 1..23: mol_type = genomic DNA
cagaatagttgggaactaaatgg

SEQ ID NO: 6144 - DNA, 23 bp, Homo sapiens
  source 1..23: mol_type = genomic DNA
acttaaagttacatcaaaaatgg

SEQ ID NO: 6145 - DNA, 23 bp, Homo sapiens
  source 1..23: mol_type = genomic DNA
tgaatatgactaatagaaattgg

SEQ ID NO: 6146 - DNA, 23 bp, Homo sapiens
  source 1..23: mol_type = genomic DNA
ggaagaatttgacagaaatatgg

SEQ ID NO: 6147 - DNA, 23 bp, Homo sapiens
  source 1..23: mol_type = genomic DNA
tgatttccttgggttccttttgg

SEQ ID NO: 6148 - DNA, 23 bp, Homo sapiens
  source 1..23: mol_type = genomic DNA
gtttttttccctgaaattttcgg

SEQ ID NO: 6149 - DNA, 23 bp, Homo sapiens
  source 1..23: mol_type = genomic DNA
ctaataaactaaagtcaaattgg

SEQ ID NO: 6150 - DNA, 23 bp, Homo sapiens
  source 1..23: mol_type = genomic DNA
cttagagctctttcaattatggg

SEQ ID NO: 6151 - DNA, 23 bp, Homo sapiens
  source 1..23: mol_type = genomic DNA
atttagatctaatttgtataggg

SEQ ID NO: 6152 - DNA, 23 bp, Homo sapiens
  source 1..23: mol_type = genomic DNA
ctagcaactatcatgctaattgg

SEQ ID NO: 6153 - DNA, 23 bp, Homo sapiens
  source 1..23: mol_type = genomic DNA
tataattgccatcaaataaaagg

SEQ ID NO: 6154 - DNA, 23 bp, Homo sapiens
  source 1..23: mol_type = genomic DNA
tttaggggtcagcttttaaaagg

SEQ ID NO: 6155 - DNA, 23 bp, Homo sapiens
  source 1..23: mol_type = genomic DNA
ctaaaaggcatttttaaatatgg

SEQ ID NO: 6156 - DNA, 23 bp, Homo sapiens
  source 1..23: mol_type = genomic DNA
tgaaccttaaatttaaataatgg

SEQ ID NO: 6157 - DNA, 23 bp, Homo sapiens
  source 1..23: mol_type = genomic DNA
aagttgtgaaattttcaaaatgg

SEQ ID NO: 6158 - DNA, 23 bp, Homo sapiens
  source 1..23: mol_type = genomic DNA
gcttttatgtgtttacttagagg

SEQ ID NO: 6159 - DNA, 23 bp, Homo sapiens
  source 1..23: mol_type = genomic DNA
tctgaaagttagccctttagagg

SEQ ID NO: 6160 - DNA, 23 bp, Homo sapiens
  source 1..23: mol_type = genomic DNA
gcgttttctactcttaataaagg

SEQ ID NO: 6161 - DNA, 23 bp, Homo sapiens
  source 1..23: mol_type = genomic DNA
ctgtattccatcagaaaaaatgg

SEQ ID NO: 6162 - DNA, 23 bp, Homo sapiens
  source 1..23: mol_type = genomic DNA
ctatttgctcaacattattcagg

SEQ ID NO: 6163 - DNA, 23 bp, Homo sapiens
  source 1..23: mol_type = genomic DNA
ttatttttctgtcagtaaaatgg

SEQ ID NO: 6164 - DNA, 23 bp, Homo sapiens
  source 1..23: mol_type = genomic DNA
agacacttgaatatgaaaattgg

SEQ ID NO: 6165 - DNA, 23 bp, Homo sapiens
  source 1..23: mol_type = genomic DNA
cataccttcctttacgttatggg

SEQ ID NO: 6166 - DNA, 23 bp, Homo sapiens
  source 1..23: mol_type = genomic DNA
tttctggaatgactgatcttagg

SEQ ID NO: 6167 - DNA, 23 bp, Homo sapiens
  source 1..23: mol_type = genomic DNA
gcttgcacagaatttttaattgg

SEQ ID NO: 6168 - DNA, 23 bp, Homo sapiens
  source 1..23: mol_type = genomic DNA
ggtgattgcattgatattaaagg

SEQ ID NO: 6169 - DNA, 23 bp, Homo sapiens
  source 1..23: mol_type = genomic DNA
attcctttccttttatttgatgg

SEQ ID NO: 6170 - DNA, 23 bp, Homo sapiens
  source 1..23: mol_type = genomic DNA
ggactgttgtcataagttatagg

SEQ ID NO: 6171 - DNA, 23 bp, Homo sapiens
  source 1..23: mol_type = genomic DNA
atttttgtcccaacaataatagg

SEQ ID NO: 6172 - DNA, 23 bp, Homo sapiens
  source 1..23: mol_type = genomic DNA
tcagaatgttcaattttataggg

SEQ ID NO: 6173 - DNA, 23 bp, Homo sapiens
  source 1..23: mol_type = genomic DNA
cttgaaaaggaagccattaaagg

SEQ ID NO: 6174 - DNA, 23 bp, Homo sapiens
  source 1..23: mol_type = genomic DNA
gcataacgtttacatcaatatgg

SEQ ID NO: 6175 - DNA, 23 bp, Homo sapiens
  source 1..23: mol_type = genomic DNA
tctccttcattgtaaatttaggg

SEQ ID NO: 6176 - DNA, 23 bp, Homo sapiens
  source 1..23: mol_type = genomic DNA
accactaaagaaaatcttttcgg

SEQ ID NO: 6177 - DNA, 23 bp, Homo sapiens
  source 1..23: mol_type = genomic DNA
gatagggcttatttttaaaatgg

SEQ ID NO: 6178 - DNA, 23 bp, Homo sapiens
  source 1..23: mol_type = genomic DNA
tcataacacccatttaaaattgg

SEQ ID NO: 6179 - DNA, 23 bp, Homo sapiens
  source 1..23: mol_type = genomic DNA
attatggcacaaaaactatttgg

SEQ ID NO: 6180 - DNA, 23 bp, Homo sapiens
  source 1..23: mol_type = genomic DNA
tatttttgcatgcaaataattgg

SEQ ID NO: 6181 - DNA, 23 bp, Homo sapiens
  source 1..23: mol_type = genomic DNA
gttcaatataactcattaaatgg

SEQ ID NO: 6182 - DNA, 23 bp, Homo sapiens
  source 1..23: mol_type = genomic DNA
cttatgctggtcagattaaatgg

SEQ ID NO: 6183 - DNA, 23 bp, Homo sapiens
  source 1..23: mol_type = genomic DNA
ttaccttgaaaactagtattagg

SEQ ID NO: 6184 - DNA, 23 bp, Homo sapiens
  source 1..23: mol_type = genomic DNA
ttttaatctccattataaattgg

SEQ ID NO: 6185 - DNA, 23 bp, Homo sapiens
  source 1..23: mol_type = genomic DNA
ctattcaactataaagtaaatgg

SEQ ID NO: 6186 - DNA, 23 bp, Homo sapiens
  source 1..23: mol_type = genomic DNA
atatctaacctggaataatttgg

SEQ ID NO: 6187 - DNA, 23 bp, Homo sapiens
  source 1..23: mol_type = genomic DNA
ccaaaagtaaacttaaaattagg

SEQ ID NO: 6188 - DNA, 23 bp, Homo sapiens
  source 1..23: mol_type = genomic DNA
gttagaggatgcaaatattttgg

SEQ ID NO: 6189 - DNA, 23 bp, Homo sapiens
  source 1..23: mol_type = genomic DNA
ctttctcattcctacttaatagg

SEQ ID NO: 6190 - DNA, 23 bp, Homo sapiens
  source 1..23: mol_type = genomic DNA
ataaaatcagtttttattaaagg

SEQ ID NO: 6191 - DNA, 23 bp, Homo sapiens
  source 1..23: mol_type = genomic DNA
gatccttccttagctgttaatgg

SEQ ID NO: 6192 - DNA, 23 bp, Homo sapiens
  source 1..23: mol_type = genomic DNA
gtaatcagacaaccttaatttgg

SEQ ID NO: 6193 - DNA, 23 bp, Homo sapiens
  source 1..23: mol_type = genomic DNA
ataacatgttgtgtaattattgg

SEQ ID NO: 6194 - DNA, 23 bp, Homo sapiens
  source 1..23: mol_type = genomic DNA
gatattggccctttctaaaaagg

SEQ ID NO: 6195 - DNA, 23 bp, Homo sapiens
  source 1..23: mol_type = genomic DNA
tgaaacatcgaatacaattttgg

SEQ ID NO: 6196 - DNA, 23 bp, Homo sapiens
  source 1..23: mol_type = genomic DNA
tataggtttcaacaattaattgg

SEQ ID NO: 6197 - DNA, 23 bp, Homo sapiens
  source 1..23: mol_type = genomic DNA
tctttttgtggtaagaaatatgg

SEQ ID NO: 6198 - DNA, 23 bp, Homo sapiens
  source 1..23: mol_type = genomic DNA
ccttagacctagattcttaaagg

SEQ ID NO: 6199 - DNA, 23 bp, Homo sapiens
  source 1..23: mol_type = genomic DNA
aatcattacctccaacttaatgg

SEQ ID NO: 6200 - DNA, 23 bp, Homo sapiens
  source 1..23: mol_type = genomic DNA
atatgtgcttttgagataattgg

SEQ ID NO: 6201 - DNA, 23 bp, Homo sapiens
  source 1..23: mol_type = genomic DNA
tcatactgtcctaagaaaaatgg

SEQ ID NO: 6202 - DNA, 23 bp, Homo sapiens
  source 1..23: mol_type = genomic DNA
atagcaaccaaaattctttctgg

SEQ ID NO: 6203 - DNA, 23 bp, Homo sapiens
  source 1..23: mol_type = genomic DNA
tgccaaatgaaaatcatacgagg

SEQ ID NO: 6204 - DNA, 23 bp, Homo sapiens
  source 1..23: mol_type = genomic DNA
tcagtcagggaaatgaccagagg

SEQ ID NO: 6205 - DNA, 23 bp, Homo sapiens
  source 1..23: mol_type = genomic DNA
gatcaaggtcttacactgggggg

SEQ ID NO: 6206 - DNA, 23 bp, Homo sapiens
  source 1..23: mol_type = genomic DNA
ttagcgttaagtgttacaggagg

SEQ ID NO: 6207 - DNA, 23 bp, Homo sapiens
  source 1..23: mol_type = genomic DNA
agggcaaagataagagacgaagg

SEQ ID NO: 6208 - DNA, 23 bp, Homo sapiens
  source 1..23: mol_type = genomic DNA
aatcaccaaacatttacacatgg

SEQ ID NO: 6209 - DNA, 23 bp, Homo sapiens
  source 1..23: mol_type = genomic DNA
gtaaacgaacagagcctgtgagg

SEQ ID NO: 6210 - DNA, 23 bp, Homo sapiens
  source 1..23: mol_type = genomic DNA
ttatttatgactatagactgggg

SEQ ID NO: 6211 - DNA, 23 bp, Homo sapiens
  source 1..23: mol_type = genomic DNA
ggaactacttgagaaagaccagg

SEQ ID NO: 6212 - DNA, 23 bp, Homo sapiens
  source 1..23: mol_type = genomic DNA
tatcttctactcctaatgggagg

SEQ ID NO: 6213 - DNA, 23 bp, Homo sapiens
  source 1..23: mol_type = genomic DNA
tagatggattgactcagtcaggg

SEQ ID NO: 6214 - DNA, 23 bp, Homo sapiens
  source 1..23: mol_type = genomic DNA
tgacatctagtagaatgactagg

SEQ ID NO: 6215 - DNA, 23 bp, Homo sapiens
  source 1..23: mol_type = genomic DNA
agacaacagcctcctaacagagg

SEQ ID NO: 6216 - DNA, 23 bp, Homo sapiens
  source 1..23: mol_type = genomic DNA
gccagtataaggtaagctagtgg

SEQ ID NO: 6217 - DNA, 23 bp, Homo sapiens
  source 1..23: mol_type = genomic DNA
tctgtgattaggacaaacaatgg

SEQ ID NO: 6218 - DNA, 23 bp, Homo sapiens
  source 1..23: mol_type = genomic DNA
tcatgcagtaatccccaactggg

SEQ ID NO: 6219 - DNA, 23 bp, Homo sapiens
  source 1..23: mol_type = genomic DNA
cccctattagagtctccttgggg

SEQ ID NO: 6220 - DNA, 23 bp, Homo sapiens
  source 1..23: mol_type = genomic DNA
ttaggtgagaactttgcaagtgg

SEQ ID NO: 6221 - DNA, 23 bp, Homo sapiens
  source 1..23: mol_type = genomic DNA
gtaccttccttttaaccctgggg

SEQ ID NO: 6222 - DNA, 23 bp, Homo sapiens
  source 1..23: mol_type = genomic DNA
ccccaaggagactctaatagggg

SEQ ID NO: 6223 - DNA, 23 bp, Homo sapiens
  source 1..23: mol_type = genomic DNA
gacaacagcctcctaacagaggg

SEQ ID NO: 6224 - DNA, 23 bp, Homo sapiens
  source 1..23: mol_type = genomic DNA
tatttatgactatagactggggg

SEQ ID NO: 6225 - DNA, 23 bp, Homo sapiens
  source 1..23: mol_type = genomic DNA
aatatataccgagaaaagagtgg

SEQ ID NO: 6226 - DNA, 23 bp, Homo sapiens
  source 1..23: mol_type = genomic DNA
aataataactttagtcaaggggg

SEQ ID NO: 6227 - DNA, 23 bp, Homo sapiens
  source 1..23: mol_type = genomic DNA
aaggcaaaatcctcagaccaggg

SEQ ID NO: 6228 - DNA, 23 bp, Homo sapiens
  source 1..23: mol_type = genomic DNA
tataaggtaagctagtggtaggg

SEQ ID NO: 6229 - DNA, 23 bp, Homo sapiens
  source 1..23: mol_type = genomic DNA
atttttactttttctgcaggcgg

SEQ ID NO: 6230 - DNA, 23 bp, Homo sapiens
  source 1..23: mol_type = genomic DNA
ttcttggaggaaaatctaagagg

SEQ ID NO: 6231 - DNA, 23 bp, Homo sapiens
  source 1..23: mol_type = genomic DNA
gctaaaaacgtaccaggccaagg

SEQ ID NO: 6232 - DNA, 23 bp, Homo sapiens
  source 1..23: mol_type = genomic DNA
tgttgatcaaggtcttacactgg

SEQ ID NO: 6233 - DNA, 23 bp, Homo sapiens
  source 1..23: mol_type = genomic DNA
gcagtttctgatcctgaagtggg

SEQ ID NO: 6234 - DNA, 23 bp, Homo sapiens
  source 1..23: mol_type = genomic DNA
aggtttctggcagacagttgggg

SEQ ID NO: 6235 - DNA, 23 bp, Homo sapiens
  source 1..23: mol_type = genomic DNA
catccccagggttaaaaggaagg

SEQ ID NO: 6236 - DNA, 23 bp, Homo sapiens
  source 1..23: mol_type = genomic DNA
tgggagggaaaaattagcaaagg

SEQ ID NO: 6237 - DNA, 23 bp, Homo sapiens
  source 1..23: mol_type = genomic DNA
aaaataagaaatactccccaagg

SEQ ID NO: 6238 - DNA, 23 bp, Homo sapiens
  source 1..23: mol_type = genomic DNA
ttaatgttttgtgaaatcaaagg

SEQ ID NO: 6239 - DNA, 23 bp, Homo sapiens
  source 1..23: mol_type = genomic DNA
atcaaggtcttacactggggggg

SEQ ID NO: 6240 - DNA, 23 bp, Homo sapiens
  source 1..23: mol_type = genomic DNA
aagacgattatttcagtcagggg

SEQ ID NO: 6241 - DNA, 23 bp, Homo sapiens
  source 1..23: mol_type = genomic DNA
acgaacatttggaagacactggg

SEQ ID NO: 6242 - DNA, 23 bp, Homo sapiens
  source 1..23: mol_type = genomic DNA
gcaaatgataaggagttctaggg

SEQ ID NO: 6243 - DNA, 23 bp, Homo sapiens
  source 1..23: mol_type = genomic DNA
ggccttctgtggaatttgggagg

SEQ ID NO: 6244 - DNA, 23 bp, Homo sapiens
  source 1..23: mol_type = genomic DNA
gtttatgctaaaaacgtaccagg

SEQ ID NO: 6245 - DNA, 23 bp, Homo sapiens
  source 1..23: mol_type = genomic DNA
tgtcctggccctctgttaggagg

SEQ ID NO: 6246 - DNA, 23 bp, Homo sapiens
  source 1..23: mol_type = genomic DNA
tcaaggtcttacactgggggggg

SEQ ID NO: 6247 - DNA, 23 bp, Homo sapiens
  source 1..23: mol_type = genomic DNA
tgataaggagttctagggtgagg

SEQ ID NO: 6248 - DNA, 23 bp, Homo sapiens
  source 1..23: mol_type = genomic DNA
aagtgttgccattcttagagtgg

SEQ ID NO: 6249 - DNA, 23 bp, Homo sapiens
  source 1..23: mol_type = genomic DNA
actttgcaagtggtttgcattgg

SEQ ID NO: 6250 - DNA, 23 bp, Homo sapiens
  source 1..23: mol_type = genomic DNA
aatggtgagtgagtggagaaggg

SEQ ID NO: 6251 - DNA, 23 bp, Homo sapiens
  source 1..23: mol_type = genomic DNA
ttatagctgaactgtttgctggg

SEQ ID NO: 6252 - DNA, 23 bp, Homo sapiens
  source 1..23: mol_type = genomic DNA
gtataaggtaagctagtggtagg

SEQ ID NO: 6253 - DNA, 23 bp, Homo sapiens
  source 1..23: mol_type = genomic DNA
atactttccagcaaagctcctgg

SEQ ID NO: 6254 - DNA, 23 bp, Homo sapiens
  source 1..23: mol_type = genomic DNA
tctgtattcggtaacaaagtagg

SEQ ID NO: 6255 - DNA, 23 bp, Homo sapiens
  source 1..23: mol_type = genomic DNA
agttaccttggagagtaagatgg

SEQ ID NO: 6256 - DNA, 23 bp, Homo sapiens
  source 1..23: mol_type = genomic DNA
gtggctttggtctaactactagg

SEQ ID NO: 6257 - DNA, 23 bp, Homo sapiens
  source 1..23: mol_type = genomic DNA
atgtgagattaatactaaaacgg

SEQ ID NO: 6258 - DNA, 23 bp, Homo sapiens
  source 1..23: mol_type = genomic DNA
ctatatatacacaagaagattgg

SEQ ID NO: 6259 - DNA, 23 bp, Homo sapiens
  source 1..23: mol_type = genomic DNA
ttcattctatagcccagttgggg

SEQ ID NO: 6260 - DNA, 23 bp, Homo sapiens
  source 1..23: mol_type = genomic DNA
tattggctcaggacatccccagg

SEQ ID NO: 6261 - DNA, 23 bp, Homo sapiens
  source 1..23: mol_type = genomic DNA
ccacatgtataaactcatacagg

SEQ ID NO: 6262 - DNA, 23 bp, Homo sapiens
  source 1..23: mol_type = genomic DNA
gctctaaacctcaatcactttgg

SEQ ID NO: 6263 - DNA, 23 bp, Homo sapiens
  source 1..23: mol_type = genomic DNA
catcattctgacattcttggagg

SEQ ID NO: 6264 - DNA, 23 bp, Homo sapiens
  source 1..23: mol_type = genomic DNA
ggagctttgctggaaagtatagg

SEQ ID NO: 6265 - DNA, 23 bp, Homo sapiens
  source 1..23: mol_type = genomic DNA
cataattgaaaggaaatatgtgg

SEQ ID NO: 6266 - DNA, 23 bp, Homo sapiens
  source 1..23: mol_type = genomic DNA
aatgtttgaatatgatacaaagg

SEQ ID NO: 6267 - DNA, 23 bp, Homo sapiens
  source 1..23: mol_type = genomic DNA
cgttaagtgttacaggaggcagg

SEQ ID NO: 6268 - DNA, 23 bp, Homo sapiens
  source 1..23: mol_type = genomic DNA
aggacttcagaatttaattgagg

SEQ ID NO: 6269 - DNA, 23 bp, Homo sapiens
  source 1..23: mol_type = genomic DNA
ttagggaaccaaagtgattgagg

SEQ ID NO: 6270 - DNA, 23 bp, Homo sapiens
  source 1..23: mol_type = genomic DNA
ccttatactggccaatctcatgg

SEQ ID NO: 6271 - DNA, 23 bp, Homo sapiens
  source 1..23: mol_type = genomic DNA
cttcagaatttaattgaggaggg

SEQ ID NO: 6272 - DNA, 23 bp, Homo sapiens
  source 1..23: mol_type = genomic DNA
gaagtgatcacgcagatacctgg

SEQ ID NO: 6273 - DNA, 23 bp, Homo sapiens
  source 1..23: mol_type = genomic DNA
gggctgacagatctgtgattagg

SEQ ID NO: 6274 - DNA, 23 bp, Homo sapiens
  source 1..23: mol_type = genomic DNA
gaaataataactttagtcaaggg

SEQ ID NO: 6275 - DNA, 23 bp, Homo sapiens
  source 1..23: mol_type = genomic DNA
tcccactttccaccaaaaagagg

SEQ ID NO: 6276 - DNA, 23 bp, Homo sapiens
  source 1..23: mol_type = genomic DNA
agtaccttccttttaaccctggg

SEQ ID NO: 6277 - DNA, 23 bp, Homo sapiens
  source 1..23: mol_type = genomic DNA
tctcctgtgttgcaatcctctgg

SEQ ID NO: 6278 - DNA, 23 bp, Homo sapiens
  source 1..23: mol_type = genomic DNA
tttcatttctagtagattgtcgg

SEQ ID NO: 6279 - DNA, 23 bp, Homo sapiens
  source 1..23: mol_type = genomic DNA
gctaataagggcttgtagtaagg

SEQ ID NO: 6280 - DNA, 23 bp, Homo sapiens
  source 1..23: mol_type = genomic DNA
gtagtgccctggacaaggtctgg

SEQ ID NO: 6281 - DNA, 23 bp, Homo sapiens
  source 1..23: mol_type = genomic DNA
ctctgggcaatagctaataaggg

SEQ ID NO: 6282 - DNA, 23 bp, Homo sapiens
  source 1..23: mol_type = genomic DNA
tagtatacatgcctcccattagg

SEQ ID NO: 6283 - DNA, 23 bp, Homo sapiens
  source 1..23: mol_type = genomic DNA
ggatcgggagcatttgttagagg

SEQ ID NO: 6284 - DNA, 23 bp, Homo sapiens
  source 1..23: mol_type = genomic DNA
tgtaaattgttcacagtcatagg

SEQ ID NO: 6285 - DNA, 23 bp, Homo sapiens
  source 1..23: mol_type = genomic DNA
atgatttagcagaatttgatagg

SEQ ID NO: 6286 - DNA, 23 bp, Homo sapiens
  source 1..23: mol_type = genomic DNA
gatatatcttctactcctaatgg

SEQ ID NO: 6287 - DNA, 23 bp, Homo sapiens
  source 1..23: mol_type = genomic DNA
tttacatgatgacctcaaattgg

SEQ ID NO: 6288 - DNA, 23 bp, Homo sapiens
  source 1..23: mol_type = genomic DNA
ctccccaaggagactctaatagg

SEQ ID NO: 6289 - DNA, 23 bp, Homo sapiens
  source 1..23: mol_type = genomic DNA
aggacatccccagggttaaaagg

SEQ ID NO: 6290 - DNA, 23 bp, Homo sapiens
  source 1..23: mol_type = genomic DNA
gctgttgtctcttcacttccagg

SEQ ID NO: 6291 - DNA, 23 bp, Homo sapiens
  source 1..23: mol_type = genomic DNA
tttgatttcacaaaacattaagg

SEQ ID NO: 6292 - DNA, 23 bp, Homo sapiens
  source 1..23: mol_type = genomic DNA
ttgacagtatacaagtttaatgg

SEQ ID NO: 6293 - DNA, 23 bp, Homo sapiens
  source 1..23: mol_type = genomic DNA
cttaatagtgaaattataaatgg

SEQ ID NO: 6294 - DNA, 23 bp, Homo sapiens
  source 1..23: mol_type = genomic DNA
aagttatatctcattcacagggg

SEQ ID NO: 6295 - DNA, 23 bp, Homo sapiens
  source 1..23: mol_type = genomic DNA
aaagcattcagatcactaggggg

SEQ ID NO: 6296 - DNA, 23 bp, Homo sapiens
  source 1..23: mol_type = genomic DNA
atttgatagagatttaactgtgg

SEQ ID NO: 6297 - DNA, 23 bp, Homo sapiens
  source 1..23: mol_type = genomic DNA
ttggaaatccaggtccacagtgg

SEQ ID NO: 6298 - DNA, 23 bp, Homo sapiens
  source 1..23: mol_type = genomic DNA
acaggggaagagtcaccaagtgg

SEQ ID NO: 6299 - DNA, 23 bp, Homo sapiens
  source 1..23: mol_type = genomic DNA
cctccaatgccatgacacagggg

SEQ ID NO: 6300 - DNA, 23 bp, Homo sapiens
  source 1..23: mol_type = genomic DNA
gcttcatattgcctaccatgtgg

SEQ ID NO: 6301 - DNA, 23 bp, Homo sapiens
  source 1..23: mol_type = genomic DNA
tgaggaacagggttaaactgagg

SEQ ID NO: 6302 - DNA, 23 bp, Homo sapiens
  source 1..23: mol_type = genomic DNA
tgtagcagtgaagaaaagagcgg

SEQ ID NO: 6303 - DNA, 23 bp, Homo sapiens
  source 1..23: mol_type = genomic DNA
cataggacaagaacttaaggggg

SEQ ID NO: 6304 - DNA, 23 bp, Homo sapiens
  source 1..23: mol_type = genomic DNA
atgaagactctagaggagggagg

SEQ ID NO: 6305 - DNA, 23 bp, Homo sapiens
  source 1..23: mol_type = genomic DNA
atcaattgtctatcacaaggtgg

SEQ ID NO: 6306 - DNA, 23 bp, Homo sapiens
  source 1..23: mol_type = genomic DNA
ttacaaacaaaagtgggacaggg

SEQ ID NO: 6307 - DNA, 23 bp, Homo sapiens
  source 1..23: mol_type = genomic DNA
tatgtcaaagcaaaccatggagg

SEQ ID NO: 6308 - DNA, 23 bp, Homo sapiens
  source 1..23: mol_type = genomic DNA
atatgtcataaacttgacagtgg

SEQ ID NO: 6309 - DNA, 23 bp, Homo sapiens
  source 1..23: mol_type = genomic DNA
tgtcagagattacagccacatgg

SEQ ID NO: 6310 - DNA, 23 bp, Homo sapiens
  source 1..23: mol_type = genomic DNA
tgtatagtgaatgtatcacttgg

SEQ ID NO: 6311 - DNA, 23 bp, Homo sapiens
  source 1..23: mol_type = genomic DNA
tctgagctagagctttaatgggg

SEQ ID NO: 6312 - DNA, 23 bp, Homo sapiens
  source 1..23: mol_type = genomic DNA
agagggacaggctaaaatggagg

SEQ ID NO: 6313 - DNA, 23 bp, Homo sapiens
  source 1..23: mol_type = genomic DNA
atgtcttcttcaaactaccaagg

SEQ ID NO: 6314 - DNA, 23 bp, Homo sapiens
  source 1..23: mol_type = genomic DNA
ctctacagatataagctgagtgg

SEQ ID NO: 6315 - DNA, 23 bp, Homo sapiens
  source 1..23: mol_type = genomic DNA
cagaccagaccgtcaatgtgagg

SEQ ID NO: 6316 - DNA, 23 bp, Homo sapiens
  source 1..23: mol_type = genomic DNA
gtgtctcacggaagcccaagggg

SEQ ID NO: 6317 - DNA, 23 bp, Homo sapiens
  source 1..23: mol_type = genomic DNA
tggccattccataggctcagggg

SEQ ID NO: 6318 - DNA, 23 bp, Homo sapiens
  source 1..23: mol_type = genomic DNA
attaaatagtagggtcactgtgg

SEQ ID NO: 6319 - DNA, 23 bp, Homo sapiens
  source 1..23: mol_type = genomic DNA
cagagctcagtagatccacatgg

SEQ ID NO: 6320 - DNA, 23 bp, Homo sapiens
  source 1..23: mol_type = genomic DNA
agtgacaagtcttatgacagtgg

SEQ ID NO: 6321 - DNA, 23 bp, Homo sapiens
  source 1..23: mol_type = genomic DNA
ttatgaatgtgatccagacaagg

SEQ ID NO: 6322 - DNA, 23 bp, Homo sapiens
  source 1..23: mol_type = genomic DNA
aaatcataagagggaagacgagg

SEQ ID NO: 6323 - DNA, 23 bp, Homo sapiens
  source 1..23: mol_type = genomic DNA
aaagttatatctcattcacaggg

SEQ ID NO: 6324 - DNA, 23 bp, Homo sapiens
  source 1..23: mol_type = genomic DNA
actctacctcctaaatgactggg

SEQ ID NO: 6325 - DNA, 23 bp, Homo sapiens
  source 1..23: mol_type = genomic DNA
ataagctgagcaacatttggggg

SEQ ID NO: 6326 - DNA, 23 bp, Homo sapiens
  source 1..23: mol_type = genomic DNA
tgaagtaaaatctgaaaacaggg

SEQ ID NO: 6327 - DNA, 23 bp, Homo sapiens
  source 1..23: mol_type = genomic DNA
tgaatgtgatccagacaaggagg

SEQ ID NO: 6328 - DNA, 23 bp, Homo sapiens
  source 1..23: mol_type = genomic DNA
acaacactgatacacacagtagg

SEQ ID NO: 6329 - DNA, 23 bp, Homo sapiens
  source 1..23: mol_type = genomic DNA
gataaccatgaagactctagagg

SEQ ID NO: 6330 - DNA, 23 bp, Homo sapiens
  source 1..23: mol_type = genomic DNA
ttgtctccagaagaataggaagg

SEQ ID NO: 6331 - DNA, 23 bp, Homo sapiens
  source 1..23: mol_type = genomic DNA
tctcccctgagcctatggaatgg

SEQ ID NO: 6332 - DNA, 23 bp, Homo sapiens
  source 1..23: mol_type = genomic DNA
agatttctatatatggcccgtgg

SEQ ID NO: 6333 - DNA, 23 bp, Homo sapiens
  source 1..23: mol_type = genomic DNA
tggcactccttggagctaggtgg

SEQ ID NO: 6334 - DNA, 23 bp, Homo sapiens
  source 1..23: mol_type = genomic DNA
gtgtaaaagcacatgctgcaggg

SEQ ID NO: 6335 - DNA, 23 bp, Homo sapiens
  source 1..23: mol_type = genomic DNA
tcaagtctgaactctcaacaagg

SEQ ID NO: 6336 - DNA, 23 bp, Homo sapiens
  source 1..23: mol_type = genomic DNA
agacacgctgagagtcacttcgg

SEQ ID NO: 6337 - DNA, 23 bp, Homo sapiens
  source 1..23: mol_type = genomic DNA
aaagcaagaggtatactaagggg

SEQ ID NO: 6338 - DNA, 23 bp, Homo sapiens
  source 1..23: mol_type = genomic DNA
gtaacttcaaatctacaatgtgg

SEQ ID NO: 6339 - DNA, 23 bp, Homo sapiens
  source 1..23: mol_type = genomic DNA
gaatgtgatccagacaaggaggg

SEQ ID NO: 6340 - DNA, 23 bp, Homo sapiens
  source 1..23: mol_type = genomic DNA
gatatttccaaagagtccatcgg

SEQ ID NO: 6341 - DNA, 23 bp, Homo sapiens
  source 1..23: mol_type = genomic DNA
aagcaagaggtatactaaggggg

SEQ ID NO: 6342 - DNA, 23 bp, Homo sapiens
  source 1..23: mol_type = genomic DNA
atagtgttgaaatataccctagg

SEQ ID NO: 6343 - DNA, 23 bp, Homo sapiens
  source 1..23: mol_type = genomic DNA
gatatatacaacctaaacggtgg

SEQ ID NO: 6344 - DNA, 23 bp, Homo sapiens
  source 1..23: mol_type = genomic DNA
tgtgtggacaaacttatcactgg

SEQ ID NO: 6345 - DNA, 23 bp, Homo sapiens
  source 1..23: mol_type = genomic DNA
aggtaggcaactgtgtctcacgg

SEQ ID NO: 6346 - DNA, 23 bp, Homo sapiens
  source 1..23: mol_type = genomic DNA
taagcaaggaaatcataagaggg

SEQ ID NO: 6347 - DNA, 23 bp, Homo sapiens
  source 1..23: mol_type = genomic DNA
ggaacctttaccttagcctgtgg

SEQ ID NO: 6348 - DNA, 23 bp, Homo sapiens
  source 1..23: mol_type = genomic DNA
aaacctatgaaaagaaaccctgg

SEQ ID NO: 6349 - DNA, 23 bp, Homo sapiens
  source 1..23: mol_type = genomic DNA
gggctcctctagccccaaagggg

SEQ ID NO: 6350 - DNA, 23 bp, Homo sapiens
  source 1..23: mol_type = genomic DNA
gtatgcataagatattggccagg

SEQ ID NO: 6351 - DNA, 23 bp, Homo sapiens
  source 1..23: mol_type = genomic DNA
gtgcagtgataactttattgcgg

SEQ ID NO: 6352 - DNA, 23 bp, Homo sapiens
  source 1..23: mol_type = genomic DNA
tgaaatacggagataaggaaggg

SEQ ID NO: 6353 - DNA, 23 bp, Homo sapiens
  source 1..23: mol_type = genomic DNA
gaatgaagaaaagtatcaggtgg

SEQ ID NO: 6354 - DNA, 23 bp, Homo sapiens
  source 1..23: mol_type = genomic DNA
gccctatgaaagacaccatgtgg

SEQ ID NO: 6355 - DNA, 23 bp, Homo sapiens
  source 1..23: mol_type = genomic DNA
gttgctcagcttatctggcaggg

SEQ ID NO: 6356 - DNA, 23 bp, Homo sapiens
  source 1..23: mol_type = genomic DNA
aggtaaagcaaatcccagctagg

SEQ ID NO: 6357 - DNA, 23 bp, Homo sapiens
  source 1..23: mol_type = genomic DNA
gtataaaactacatttgtgaagg

SEQ ID NO: 6358 - DNA, 23 bp, Homo sapiens
  source 1..23: mol_type = genomic DNA
agtacttccacctagctccaagg

SEQ ID NO: 6359 - DNA, 23 bp, Homo sapiens
  source 1..23: mol_type = genomic DNA
aatcaacctgttaaagaaagggg

SEQ ID NO: 6360 - DNA, 23 bp, Homo sapiens
  source 1..23: mol_type = genomic DNA
aatacatcttggggagcgggggg

SEQ ID NO: 6361 - DNA, 23 bp, Homo sapiens
  source 1..23: mol_type = genomic DNA
tcttaaaataaccataagcaggg

SEQ ID NO: 6362 - DNA, 23 bp, Homo sapiens
  source 1..23: mol_type = genomic DNA
aaataagacgtcagaatgagggg

SEQ ID NO: 6363 - DNA, 23 bp, Homo sapiens
  source 1..23: mol_type = genomic DNA
tgtgacaagcactctatggttgg

SEQ ID NO: 6364 - DNA, 23 bp, Homo sapiens
  source 1..23: mol_type = genomic DNA
tgggagactatgctactaagtgg

SEQ ID NO: 6365 - DNA, 23 bp, Homo sapiens
  source 1..23: mol_type = genomic DNA
cagtcacagctaaaccaagtagg

SEQ ID NO: 6366 - DNA, 23 bp, Homo sapiens
  source 1..23: mol_type = genomic DNA
atatatacaacctaaacggtggg

SEQ ID NO: 6367 - DNA, 23 bp, Homo sapiens
  source 1..23: mol_type = genomic DNA
acaggttaaacgccaggacaggg

SEQ ID NO: 6368 - DNA, 23 bp, Homo sapiens
  source 1..23: mol_type = genomic DNA
agggacagaattgtattcagtgg

SEQ ID NO: 6369 - DNA, 23 bp, Homo sapiens
  source 1..23: mol_type = genomic DNA
attgtttctaggaaggcaggtgg

SEQ ID NO: 6370 - DNA, 23 bp, Homo sapiens
  source 1..23: mol_type = genomic DNA
aaacatactcactcatactgcgg

SEQ ID NO: 6371 - DNA, 23 bp, Homo sapiens
  source 1..23: mol_type = genomic DNA
tcatagcccagtcatttaggagg

SEQ ID NO: 6372 - DNA, 23 bp, Homo sapiens
  source 1..23: mol_type = genomic DNA
aaaccaagtaggcaggtcagagg

SEQ ID NO: 6373 - DNA, 23 bp, Homo sapiens
  source 1..23: mol_type = genomic DNA
ttctgcatgagaatgtcttgagg

SEQ ID NO: 6374 - DNA, 23 bp, Homo sapiens
  source 1..23: mol_type = genomic DNA
tggaggatagaaaacctccatgg

SEQ ID NO: 6375 - DNA, 23 bp, Homo sapiens
  source 1..23: mol_type = genomic DNA
tgaactttttgacactggggggg

SEQ ID NO: 6376 - DNA, 23 bp, Homo sapiens
  source 1..23: mol_type = genomic DNA
cttgaataaaatattgacgatgg

SEQ ID NO: 6377 - DNA, 23 bp, Homo sapiens
  source 1..23: mol_type = genomic DNA
tgtgtctcacggaagcccaaggg

SEQ ID NO: 6378 - DNA, 23 bp, Homo sapiens
  source 1..23: mol_type = genomic DNA
actagtctggcgatagaagaggg

SEQ ID NO: 6379 - DNA, 23 bp, Homo sapiens
  source 1..23: mol_type = genomic DNA
tattcttaacattctatgcgtgg

SEQ ID NO: 6380 - DNA, 23 bp, Homo sapiens
  source 1..23: mol_type = genomic DNA
cattatgtcaaagcaaaccatgg

SEQ ID NO: 6381 - DNA, 23 bp, Homo sapiens
  source 1..23: mol_type = genomic DNA
gttaggtctctaataaacaatgg

SEQ ID NO: 6382 - DNA, 23 bp, Homo sapiens
  source 1..23: mol_type = genomic DNA
agagaagttactgtatggcaggg

SEQ ID NO: 6383 - DNA, 23 bp, Homo sapiens
  source 1..23: mol_type = genomic DNA
ttgagagtacaaataactgtagg

SEQ ID NO: 6384 - DNA, 23 bp, Homo sapiens
  source 1..23: mol_type = genomic DNA
aaacccatgagaaatggctcagg

SEQ ID NO: 6385 - DNA, 23 bp, Homo sapiens
  source 1..23: mol_type = genomic DNA
acaaagtcctgcagtcaactcgg

SEQ ID NO: 6386 - DNA, 23 bp, Homo sapiens
  source 1..23: mol_type = genomic DNA
ccatgttcctgaaggaaagtggg

SEQ ID NO: 6387 - DNA, 23 bp, Homo sapiens
  source 1..23: mol_type = genomic DNA
tggttggaaattaaatagtaggg

SEQ ID NO: 6388 - DNA, 23 bp, Homo sapiens
  source 1..23: mol_type = genomic DNA
gcataggacaagaacttaagggg

SEQ ID NO: 6389 - DNA, 23 bp, Homo sapiens
  source 1..23: mol_type = genomic DNA
gattcctcatatggcagtagagg

SEQ ID NO: 6390 - DNA, 23 bp, Homo sapiens
  source 1..23: mol_type = genomic DNA
atgcctttaaaatagacagcagg

SEQ ID NO: 6391 - DNA, 23 bp, Homo sapiens
  source 1..23: mol_type = genomic DNA
cactcctcaaatgtttaaggtgg

SEQ ID NO: 6392 - DNA, 23 bp, Homo sapiens
  source 1..23: mol_type = genomic DNA
agaaagcattcagatcactaggg

SEQ ID NO: 6393 - DNA, 23 bp, Homo sapiens
  source 1..23: mol_type = genomic DNA
ttaaaacctccgaaactccacgg

SEQ ID NO: 6394 - DNA, 23 bp, Homo sapiens
  source 1..23: mol_type = genomic DNA
tgtcttttcccttccctctgtgg

SEQ ID NO: 6395 - DNA, 23 bp, Homo sapiens
  source 1..23: mol_type = genomic DNA
atcaatagataaattcatagtgg

SEQ ID NO: 6396 - DNA, 23 bp, Homo sapiens
  source 1..23: mol_type = genomic DNA
taacattcattctaaaacagagg

SEQ ID NO: 6397 - DNA, 23 bp, Homo sapiens
  source 1..23: mol_type = genomic DNA
actgattatgtctagccttgtgg

SEQ ID NO: 6398 - DNA, 23 bp, Homo sapiens
  source 1..23: mol_type = genomic DNA
ataatggcttaaatttgagaagg

SEQ ID NO: 6399 - DNA, 23 bp, Homo sapiens
  source 1..23: mol_type = genomic DNA
ttaaacgccaggacagggaaagg

SEQ ID NO: 6400 - DNA, 23 bp, Homo sapiens
  source 1..23: mol_type = genomic DNA
ggggtgagaagaagaaagcatgg

SEQ ID NO: 6401 - DNA, 23 bp, Homo sapiens
  source 1..23: mol_type = genomic DNA
aagtgcctggtgaaatgtattgg

SEQ ID NO: 6402 - DNA, 23 bp, Homo sapiens
  source 1..23: mol_type = genomic DNA
gtcttatgacagtggataagggg

SEQ ID NO: 6403 - DNA, 23 bp, Homo sapiens
  source 1..23: mol_type = genomic DNA
tatggcccgtggagtttcggagg

SEQ ID NO: 6404 - DNA, 23 bp, Homo sapiens
  source 1..23: mol_type = genomic DNA
atagtggcttttccttatggagg

SEQ ID NO: 6405 - DNA, 23 bp, Homo sapiens
  source 1..23: mol_type = genomic DNA
ctgtaatctctgacacacaaagg

SEQ ID NO: 6406 - DNA, 23 bp, Homo sapiens
  source 1..23: mol_type = genomic DNA
cctattatgttcacatatggagg

SEQ ID NO: 6407 - DNA, 23 bp, Homo sapiens
  source 1..23: mol_type = genomic DNA
ggttttgtcctctaacgcatagg

SEQ ID NO: 6408 - DNA, 23 bp, Homo sapiens
  source 1..23: mol_type = genomic DNA
taaaacctccgaaactccacggg

SEQ ID NO: 6409 - DNA, 23 bp, Homo sapiens
  source 1..23: mol_type = genomic DNA
gacttgagcttaaaaagttgggg

SEQ ID NO: 6410 - DNA, 23 bp, Homo sapiens
  source 1..23: mol_type = genomic DNA
ttagaacttagttatatccaagg

SEQ ID NO: 6411 - DNA, 23 bp, Homo sapiens
  source 1..23: mol_type = genomic DNA
agtgaagtaggagtggaaaacgg

SEQ ID NO: 6412 - DNA, 23 bp, Homo sapiens
  source 1..23: mol_type = genomic DNA
agtttatctttgaaagagagagg

SEQ ID NO: 6413 - DNA, 23 bp, Homo sapiens
  source 1..23: mol_type = genomic DNA
gtattttacactgcatatgaggg

SEQ ID NO: 6414 - DNA, 23 bp, Homo sapiens
  source 1..23: mol_type = genomic DNA
ggtatttgtcatgcctgaaaggg

SEQ ID NO: 6415 - DNA, 23 bp, Homo sapiens
  source 1..23: mol_type = genomic DNA
ctaatctcctctgaaccacttgg

SEQ ID NO: 6416 - DNA, 23 bp, Homo sapiens
  source 1..23: mol_type = genomic DNA
ctagacagagataagagagctgg

SEQ ID NO: 6417 - DNA, 23 bp, Homo sapiens
  source 1..23: mol_type = genomic DNA
taatacatcttggggagcggggg

SEQ ID NO: 6418 - DNA, 23 bp, Homo sapiens
  source 1..23: mol_type = genomic DNA
atataatcacattttgcaagtgg

SEQ ID NO: 6419 - DNA, 23 bp, Homo sapiens
  source 1..23: mol_type = genomic DNA
cgtggtttctggctaatttgggg

SEQ ID NO: 6420 - DNA, 23 bp, Homo sapiens
  source 1..23: mol_type = genomic DNA
aacatactcactcatactgcggg

SEQ ID NO: 6421 - DNA, 23 bp, Homo sapiens
  source 1..23: mol_type = genomic DNA
cctgttgacaatcagcgaaacgg

SEQ ID NO: 6422 - DNA, 23 bp, Homo sapiens
  source 1..23: mol_type = genomic DNA
gtatgcagtttaaaaatggaagg

SEQ ID NO: 6423 - DNA, 23 bp, Homo sapiens
  source 1..23: mol_type = genomic DNA
ttttaaaattagctaagggaggg

SEQ ID NO: 6424 - DNA, 23 bp, Homo sapiens
  source 1..23: mol_type = genomic DNA
tgtaatctctgacacacaaaggg

SEQ ID NO: 6425 - DNA, 23 bp, Homo sapiens
  source 1..23: mol_type = genomic DNA
tgagtgatttttttaaaccaggg

SEQ ID NO: 6426 - DNA, 23 bp, Homo sapiens
  source 1..23: mol_type = genomic DNA
ataaatcaaaatgctcaagcagg

SEQ ID NO: 6427 - DNA, 23 bp, Homo sapiens
  source 1..23: mol_type = genomic DNA
ctgttattataacaattcacagg

SEQ ID NO: 6428 - DNA, 23 bp, Homo sapiens
  source 1..23: mol_type = genomic DNA
agaggtatactaagggggatggg

SEQ ID NO: 6429 - DNA, 23 bp, Homo sapiens
  source 1..23: mol_type = genomic DNA
tctcatgcagaaaccaaacttgg

SEQ ID NO: 6430 - DNA, 23 bp, Homo sapiens
  source 1..23: mol_type = genomic DNA
tcagccacaggctaaggtaaagg

SEQ ID NO: 6431 - DNA, 23 bp, Homo sapiens
  source 1..23: mol_type = genomic DNA
tccatgttcctgaaggaaagtgg

SEQ ID NO: 6432 - DNA, 23 bp, Homo sapiens
  source 1..23: mol_type = genomic DNA
cagcctgagccatttctcatggg

SEQ ID NO: 6433 - DNA, 23 bp, Homo sapiens
  source 1..23: mol_type = genomic DNA
gcaaatgcatgctgccacagagg

SEQ ID NO: 6434 - DNA, 23 bp, Homo sapiens
  source 1..23: mol_type = genomic DNA
tattttacaggcctattgtgtgg

SEQ ID NO: 6435 - DNA, 23 bp, Homo sapiens
  source 1..23: mol_type = genomic DNA
gcatgctgccacagagggaaggg

SEQ ID NO: 6436 - DNA, 23 bp, Homo sapiens
  source 1..23: mol_type = genomic DNA
ataatacatcttggggagcgggg

SEQ ID NO: 6437 - DNA, 23 bp, Homo sapiens
  source 1..23: mol_type = genomic DNA
agagtcaccaagtggttcagagg

SEQ ID NO: 6438 - DNA, 23 bp, Homo sapiens
  source 1..23: mol_type = genomic DNA
ttagggagctactaagtgcctgg

SEQ ID NO: 6439 - DNA, 23 bp, Homo sapiens
  source 1..23: mol_type = genomic DNA
agacttgtcactgtgtaagcagg

SEQ ID NO: 6440 - DNA, 23 bp, Homo sapiens
  source 1..23: mol_type = genomic DNA
agacagcgtttaataagtgttgg

SEQ ID NO: 6441 - DNA, 23 bp, Homo sapiens
  source 1..23: mol_type = genomic DNA
tatattttctgtaagaaatgtgg

SEQ ID NO: 6442 - DNA, 23 bp, Homo sapiens
  source 1..23: mol_type = genomic DNA
gcctccaatgccatgacacaggg

SEQ ID NO: 6443 - DNA, 23 bp, Homo sapiens
  source 1..23: mol_type = genomic DNA
gaaagaagaatagcagactaggg

SEQ ID NO: 6444 - DNA, 23 bp, Homo sapiens
  source 1..23: mol_type = genomic DNA
aacctcctaatgttttagtaggg

SEQ ID NO: 6445 - DNA, 23 bp, Homo sapiens
  source 1..23: mol_type = genomic DNA
tagattactgcagattaaagagg

SEQ ID NO: 6446 - DNA, 23 bp, Homo sapiens
  source 1..23: mol_type = genomic DNA
ccaatttgcattctttgtggtgg

SEQ ID NO: 6447 - DNA, 23 bp, Homo sapiens
  source 1..23: mol_type = genomic DNA
tcaatacatgcatctctcaatgg

SEQ ID NO: 6448 - DNA, 23 bp, Homo sapiens
  source 1..23: mol_type = genomic DNA
aatattcctttaaaaatcagagg

SEQ ID NO: 6449 - DNA, 23 bp, Homo sapiens
  source 1..23: mol_type = genomic DNA
ttaaaattagctaagggaggggg

SEQ ID NO: 6450 - DNA, 23 bp, Homo sapiens
  source 1..23: mol_type = genomic DNA
ataaaagagaagttactgtatgg

SEQ ID NO: 6451 - DNA, 23 bp, Homo sapiens
  source 1..23: mol_type = genomic DNA
cttgcacatccaacttcataggg

SEQ ID NO: 6452 - DNA, 23 bp, Homo sapiens
  source 1..23: mol_type = genomic DNA
ttccctactaaaacattaggagg

SEQ ID NO: 6453 - DNA, 23 bp, Homo sapiens
  source 1..23: mol_type = genomic DNA
ggaagacgaggacacaagcttgg

SEQ ID NO: 6454 - DNA, 23 bp, Homo sapiens
  source 1..23: mol_type = genomic DNA
cataggtttatagaattaggagg

SEQ ID NO: 6455 - DNA, 23 bp, Homo sapiens
  source 1..23: mol_type = genomic DNA
agcccagtacctgaatatagtgg

SEQ ID NO: 6456 - DNA, 23 bp, Homo sapiens
  source 1..23: mol_type = genomic DNA
ctaatttcccttaaagcaagagg

SEQ ID NO: 6457 - DNA, 23 bp, Homo sapiens
  source 1..23: mol_type = genomic DNA
cttttactgtaaaccatcatggg

SEQ ID NO: 6458 - DNA, 23 bp, Homo sapiens
  source 1..23: mol_type = genomic DNA
ttattcaaatgtaattttggagg

SEQ ID NO: 6459 - DNA, 23 bp, Homo sapiens
  source 1..23: mol_type = genomic DNA
gtaaataagacgtcagaatgagg

SEQ ID NO: 6460 - DNA, 23 bp, Homo sapiens
  source 1..23: mol_type = genomic DNA
tattgttcagccacaggctaagg

SEQ ID NO: 6461 - DNA, 23 bp, Homo sapiens
  source 1..23: mol_type = genomic DNA
gcagtgttttgtgcaacaaacgg

SEQ ID NO: 6462 - DNA, 23 bp, Homo sapiens
  source 1..23: mol_type = genomic DNA
aaacttttaaggatatttcaggg

SEQ ID NO: 6463 - DNA, 23 bp, Homo sapiens
  source 1..23: mol_type = genomic DNA
atgtcatatgaatctcttcaggg

SEQ ID NO: 6464 - DNA, 23 bp, Homo sapiens
  source 1..23: mol_type = genomic DNA
tgttgctcagcttatctggcagg

SEQ ID NO: 6465 - DNA, 23 bp, Homo sapiens
  source 1..23: mol_type = genomic DNA
aggatgttaataagaaaggaagg

SEQ ID NO: 6466 - DNA, 23 bp, Homo sapiens
  source 1..23: mol_type = genomic DNA
ttggagctaggtggaagtactgg

SEQ ID NO: 6467 - DNA, 23 bp, Homo sapiens
  source 1..23: mol_type = genomic DNA
gagatatagaaaccaaaaacggg

SEQ ID NO: 6468 - DNA, 23 bp, Homo sapiens
  source 1..23: mol_type = genomic DNA
attaatatataatcatttcaggg

SEQ ID NO: 6469 - DNA, 23 bp, Homo sapiens
  source 1..23: mol_type = genomic DNA
gcatataatgttagataaagagg

SEQ ID NO: 6470 - DNA, 23 bp, Homo sapiens
  source 1..23: mol_type = genomic DNA
gtgttgtgacaagcactctatgg

SEQ ID NO: 6471 - DNA, 23 bp, Homo sapiens
  source 1..23: mol_type = genomic DNA
gtaagcaaggaaatcataagagg

SEQ ID NO: 6472 - DNA, 23 bp, Homo sapiens
  source 1..23: mol_type = genomic DNA
ctgagctctggccattccatagg

SEQ ID NO: 6473 - DNA, 23 bp, Homo sapiens
  source 1..23: mol_type = genomic DNA
ttaaagcaagaggtatactaagg

SEQ ID NO: 6474 - DNA, 23 bp, Homo sapiens
  source 1..23: mol_type = genomic DNA
ttttatttacaagtttttgaagg

SEQ ID NO: 6475 - DNA, 23 bp, Homo sapiens
  source 1..23: mol_type = genomic DNA
agacatagacctgacctgatagg

SEQ ID NO: 6476 - DNA, 23 bp, Homo sapiens
  source 1..23: mol_type = genomic DNA
gttgccatggacctgactctggg

SEQ ID NO: 6477 - DNA, 23 bp, Homo sapiens
  source 1..23: mol_type = genomic DNA
aagcatttgcggttttaacttgg

SEQ ID NO: 6478 - DNA, 23 bp, Homo sapiens
  source 1..23: mol_type = genomic DNA
aaatcaacctgttaaagaaaggg

SEQ ID NO: 6479 - DNA, 23 bp, Homo sapiens
  source 1..23: mol_type = genomic DNA
tcttcaatgcctcacattgacgg

SEQ ID NO: 6480 - DNA, 23 bp, Homo sapiens
  source 1..23: mol_type = genomic DNA
ggctttttaaatactcaccttgg

SEQ ID NO: 6481 - DNA, 23 bp, Homo sapiens
  source 1..23: mol_type = genomic DNA
gtaccgcattttctttatgcagg

SEQ ID NO: 6482 - DNA, 23 bp, Homo sapiens
  source 1..23: mol_type = genomic DNA
tgagatatagaaaccaaaaacgg

SEQ ID NO: 6483 - DNA, 23 bp, Homo sapiens
  source 1..23: mol_type = genomic DNA
aatttccttttaaaattcacagg

SEQ ID NO: 6484 - DNA, 23 bp, Homo sapiens
  source 1..23: mol_type = genomic DNA
gaaaggggtaaaacatttgaagg

SEQ ID NO: 6485 - DNA, 23 bp, Homo sapiens
  source 1..23: mol_type = genomic DNA
aataaatctccctatgaagttgg

SEQ ID NO: 6486 - DNA, 23 bp, Homo sapiens
  source 1..23: mol_type = genomic DNA
ggagtggaaaacggtataatcgg

SEQ ID NO: 6487 - DNA, 23 bp, Homo sapiens
  source 1..23: mol_type = genomic DNA
ttatgtctagccttgtggttggg

SEQ ID NO: 6488 - DNA, 23 bp, Homo sapiens
  source 1..23: mol_type = genomic DNA
ttaattataatggcactccttgg

SEQ ID NO: 6489 - DNA, 23 bp, Homo sapiens
  source 1..23: mol_type = genomic DNA
atttttacttggggtatgaatgg

SEQ ID NO: 6490 - DNA, 23 bp, Homo sapiens
  source 1..23: mol_type = genomic DNA
atatgaaaacccatgagaaatgg

SEQ ID NO: 6491 - DNA, 23 bp, Homo sapiens
  source 1..23: mol_type = genomic DNA
cataataattttcaatgcatggg

SEQ ID NO: 6492 - DNA, 23 bp, Homo sapiens
  source 1..23: mol_type = genomic DNA
ctagggggtaattaactgattgg

SEQ ID NO: 6493 - DNA, 23 bp, Homo sapiens
  source 1..23: mol_type = genomic DNA
actgggctcagacctgataaagg

SEQ ID NO: 6494 - DNA, 23 bp, Homo sapiens
  source 1..23: mol_type = genomic DNA
ttataatttgtgtatgtggcagg

SEQ ID NO: 6495 - DNA, 23 bp, Homo sapiens
  source 1..23: mol_type = genomic DNA
ttttttctaaagttgagcttggg

SEQ ID NO: 6496 - DNA, 23 bp, Homo sapiens
  source 1..23: mol_type = genomic DNA
ccgtttcgctgattgtcaacagg

SEQ ID NO: 6497 - DNA, 23 bp, Homo sapiens
  source 1..23: mol_type = genomic DNA
tgggctcctctagccccaaaggg

SEQ ID NO: 6498 - DNA, 23 bp, Homo sapiens
  source 1..23: mol_type = genomic DNA
ctggttgtctccagaagaatagg

SEQ ID NO: 6499 - DNA, 23 bp, Homo sapiens
  source 1..23: mol_type = genomic DNA
agtactttcttctcaataagtgg

SEQ ID NO: 6500 - DNA, 23 bp, Homo sapiens
  source 1..23: mol_type = genomic DNA
ttaaaaagttggggctatatggg

SEQ ID NO: 6501 - DNA, 23 bp, Homo sapiens
  source 1..23: mol_type = genomic DNA
cagtgactattttcaatgatggg

SEQ ID NO: 6502 - DNA, 23 bp, Homo sapiens
  source 1..23: mol_type = genomic DNA
agtcactgaattagattgaatgg

SEQ ID NO: 6503 - DNA, 23 bp, Homo sapiens
  source 1..23: mol_type = genomic DNA
ttttaggatgttaataagaaagg

SEQ ID NO: 6504 - DNA, 23 bp, Homo sapiens
  source 1..23: mol_type = genomic DNA
ccacatacacaaattataaacgg

SEQ ID NO: 6505 - DNA, 23 bp, Homo sapiens
  source 1..23: mol_type = genomic DNA
ggagacttagatcaagtaatagg

SEQ ID NO: 6506 - DNA, 23 bp, Homo sapiens
  source 1..23: mol_type = genomic DNA
tgatcactctgatacattgcagg

SEQ ID NO: 6507 - DNA, 23 bp, Homo sapiens
  source 1..23: mol_type = genomic DNA
aatccatgaagaaaaattgatgg

SEQ ID NO: 6508 - DNA, 23 bp, Homo sapiens
  source 1..23: mol_type = genomic DNA
gcagtcagccttaattataatgg

SEQ ID NO: 6509 - DNA, 23 bp, Homo sapiens
  source 1..23: mol_type = genomic DNA
gattgtggctaatataattcagg

SEQ ID NO: 6510 - DNA, 23 bp, Homo sapiens
  source 1..23: mol_type = genomic DNA
tctccacaaaaagctttaagagg

SEQ ID NO: 6511 - DNA, 23 bp, Homo sapiens
  source 1..23: mol_type = genomic DNA
atatatggcccgtggagtttcgg

SEQ ID NO: 6512 - DNA, 23 bp, Homo sapiens
  source 1..23: mol_type = genomic DNA
cagggtgatgattatttaagagg

SEQ ID NO: 6513 - DNA, 23 bp, Homo sapiens
  source 1..23: mol_type = genomic DNA
aagcccaaggggtaagaaaaagg

SEQ ID NO: 6514 - DNA, 23 bp, Homo sapiens
  source 1..23: mol_type = genomic DNA
tgctttagtctaatttcaattgg

SEQ ID NO: 6515 - DNA, 23 bp, Homo sapiens
  source 1..23: mol_type = genomic DNA
tccctcctctagagtcttcatgg

SEQ ID NO: 6516 - DNA, 23 bp, Homo sapiens
  source 1..23: mol_type = genomic DNA
agataagctgagcaacatttggg

SEQ ID NO: 6517 - DNA, 23 bp, Homo sapiens
  source 1..23: mol_type = genomic DNA
tctgttttagaatgaatgttagg

SEQ ID NO: 6518 - DNA, 23 bp, Homo sapiens
  source 1..23: mol_type = genomic DNA
gaaactgtgcagcaattaattgg

SEQ ID NO: 6519 - DNA, 23 bp, Homo sapiens
  source 1..23: mol_type = genomic DNA
tcttgcacatccaacttcatagg

SEQ ID NO: 6520 - DNA, 23 bp, Homo sapiens
  source 1..23: mol_type = genomic DNA
cctccatatgtgaacataatagg

SEQ ID NO: 6521 - DNA, 23 bp, Homo sapiens
  source 1..23: mol_type = genomic DNA
ataaagtgcaaatattttacagg

SEQ ID NO: 6522 - DNA, 23 bp, Homo sapiens
  source 1..23: mol_type = genomic DNA
gttttacccctttctttaacagg

SEQ ID NO: 6523 - DNA, 23 bp, Homo sapiens
  source 1..23: mol_type = genomic DNA
cttttatcccactttccttcagg

SEQ ID NO: 6524 - DNA, 23 bp, Homo sapiens
  source 1..23: mol_type = genomic DNA
atgtacttccaccatctatttgg

SEQ ID NO: 6525 - DNA, 23 bp, Homo sapiens
  source 1..23: mol_type = genomic DNA
gtcataagtataaacaaaaatgg

SEQ ID NO: 6526 - DNA, 23 bp, Homo sapiens
  source 1..23: mol_type = genomic DNA
atatacctgtgaattttaaaagg

SEQ ID NO: 6527 - DNA, 23 bp, Homo sapiens
  source 1..23: mol_type = genomic DNA
cacttcacacagattttaaaagg

SEQ ID NO: 6528 - DNA, 23 bp, Homo sapiens
  source 1..23: mol_type = genomic DNA
ctagtgatctgaatgctttctgg

SEQ ID NO: 6529 - DNA, 23 bp, Homo sapiens
  source 1..23: mol_type = genomic DNA
cttcgtcgtaaacttgttaaagg

SEQ ID NO: 6530 - DNA, 23 bp, Homo sapiens
  source 1..23: mol_type = genomic DNA
ttaagtttctgaatacttaaagg

SEQ ID NO: 6531 - DNA, 23 bp, Homo sapiens
  source 1..23: mol_type = genomic DNA
aagtagaagcaataacagcgagg

SEQ ID NO: 6532 - DNA, 23 bp, Homo sapiens
  source 1..23: mol_type = genomic DNA
taagtgggagaatatctgcaagg

SEQ ID NO: 6533 - DNA, 23 bp, Homo sapiens
  source 1..23: mol_type = genomic DNA
aagtaatgaaaatagaaccaagg

SEQ ID NO: 6534 - DNA, 23 bp, Homo sapiens
  source 1..23: mol_type = genomic DNA
ctacttcacaacagtaagcgggg

SEQ ID NO: 6535 - DNA, 23 bp, Homo sapiens
  source 1..23: mol_type = genomic DNA
tttagagacagtgagacctgagg

SEQ ID NO: 6536 - DNA, 23 bp, Homo sapiens
  source 1..23: mol_type = genomic DNA
tttggaataaaaatatatggggg

SEQ ID NO: 6537 - DNA, 23 bp, Homo sapiens
  source 1..23: mol_type = genomic DNA
ttatgtacagtgactgcaggagg

SEQ ID NO: 6538 - DNA, 23 bp, Homo sapiens
  source 1..23: mol_type = genomic DNA
aagcagtttggggagagatgcgg

SEQ ID NO: 6539 - DNA, 23 bp, Homo sapiens
  source 1..23: mol_type = genomic DNA
tagatctatcagataacgagcgg

SEQ ID NO: 6540 - DNA, 23 bp, Homo sapiens
  source 1..23: mol_type = genomic DNA
ttggtaggcaggaatttacaggg

SEQ ID NO: 6541 - DNA, 23 bp, Homo sapiens
  source 1..23: mol_type = genomic DNA
ataacaaatcttgctaacagtgg

SEQ ID NO: 6542 - DNA, 23 bp, Homo sapiens
  source 1..23: mol_type = genomic DNA
gttcaatgagaagtcctccatgg

SEQ ID NO: 6543 - DNA, 23 bp, Homo sapiens
  source 1..23: mol_type = genomic DNA
aaaacaacaggctataagagagg

SEQ ID NO: 6544 - DNA, 23 bp, Homo sapiens
  source 1..23: mol_type = genomic DNA
tagtggatataagttcatgttgg

SEQ ID NO: 6545 - DNA, 23 bp, Homo sapiens
  source 1..23: mol_type = genomic DNA
tgaaccttaaccttcccagaagg

SEQ ID NO: 6546 - DNA, 23 bp, Homo sapiens
  source 1..23: mol_type = genomic DNA
ggtctcactgtctctaaaggagg

SEQ ID NO: 6547 - DNA, 23 bp, Homo sapiens
  source 1..23: mol_type = genomic DNA
tgccactaagatggtaaccgtgg

SEQ ID NO: 6548 - DNA, 23 bp, Homo sapiens
  source 1..23: mol_type = genomic DNA
ataaagaaaaaaaacaacaaagg

SEQ ID NO: 6549 - DNA, 23 bp, Homo sapiens
  source 1..23: mol_type = genomic DNA
agcagatagtggcttaatggtgg

SEQ ID NO: 6550 - DNA, 23 bp, Homo sapiens
  source 1..23: mol_type = genomic DNA
tgtcttgcacagaagtgacttgg

SEQ ID NO: 6551 - DNA, 23 bp, Homo sapiens
  source 1..23: mol_type = genomic DNA
ctatgttattaatagtgccatgg

SEQ ID NO: 6552 - DNA, 23 bp, Homo sapiens
  source 1..23: mol_type = genomic DNA
gagacagtgagacctgaggacgg

SEQ ID NO: 6553 - DNA, 23 bp, Homo sapiens
  source 1..23: mol_type = genomic DNA
acaacagtaagcggggagagggg

SEQ ID NO: 6554 - DNA, 23 bp, Homo sapiens
  source 1..23: mol_type = genomic DNA
tttaacgttatgcacatagaggg

SEQ ID NO: 6555 - DNA, 23 bp, Homo sapiens
  source 1..23: mol_type = genomic DNA
gtatgttgcattagaaaaagggg

SEQ ID NO: 6556 - DNA, 23 bp, Homo sapiens
  source 1..23: mol_type = genomic DNA
cagaggaatagaaatgaagaggg

SEQ ID NO: 6557 - DNA, 23 bp, Homo sapiens
  source 1..23: mol_type = genomic DNA
acgtatatatatacaatgagtgg

SEQ ID NO: 6558 - DNA, 23 bp, Homo sapiens
  source 1..23: mol_type = genomic DNA
tgcttaatagttttagaacaggg

SEQ ID NO: 6559 - DNA, 23 bp, Homo sapiens
  source 1..23: mol_type = genomic DNA
gcagaggtcaaatagacagtcgg

SEQ ID NO: 6560 - DNA, 23 bp, Homo sapiens
  source 1..23: mol_type = genomic DNA
agacagtgagacctgaggacggg

SEQ ID NO: 6561 - DNA, 23 bp, Homo sapiens
  source 1..23: mol_type = genomic DNA
tcaaggatatggtgattcaaggg

SEQ ID NO: 6562 - DNA, 23 bp, Homo sapiens
  source 1..23: mol_type = genomic DNA
gagtaactgactaaataagtagg

SEQ ID NO: 6563 - DNA, 23 bp, Homo sapiens
  source 1..23: mol_type = genomic DNA
acatttgtttcacacgtcaaggg

SEQ ID NO: 6564 - DNA, 23 bp, Homo sapiens
  source 1..23: mol_type = genomic DNA
ggcaacaaagaatagctcatagg

SEQ ID NO: 6565 - DNA, 23 bp, Homo sapiens
  source 1..23: mol_type = genomic DNA
ttccaaccgtaatttagcacagg

SEQ ID NO: 6566 - DNA, 23 bp, Homo sapiens
  source 1..23: mol_type = genomic DNA
gtcctgtgctaaattacggttgg

SEQ ID NO: 6567 - DNA, 23 bp, Homo sapiens
  source 1..23: mol_type = genomic DNA
atcattgagctggtccccaaagg

SEQ ID NO: 6568 - DNA, 23 bp, Homo sapiens
  source 1..23: mol_type = genomic DNA
atttcttatcacgattaagtggg

SEQ ID NO: 6569 - DNA, 23 bp, Homo sapiens
  source 1..23: mol_type = genomic DNA
gtggaggcgcttttgcaatgagg

SEQ ID NO: 6570 - DNA, 23 bp, Homo sapiens
  source 1..23: mol_type = genomic DNA
aaaagcagcactatggagcaggg

SEQ ID NO: 6571 - DNA, 23 bp, Homo sapiens
  source 1..23: mol_type = genomic DNA
ggagaggggaagagaaagagcgg

SEQ ID NO: 6572 - DNA, 23 bp, Homo sapiens
  source 1..23: mol_type = genomic DNA
atgtatatgtatacaatgagtgg

SEQ ID NO: 6573 - DNA, 23 bp, Homo sapiens
  source 1..23: mol_type = genomic DNA
ccttaacatttcagacgacatgg

SEQ ID NO: 6574 - DNA, 23 bp, Homo sapiens
  source 1..23: mol_type = genomic DNA
accatggcccagaacaggggtgg

SEQ ID NO: 6575 - DNA, 23 bp, Homo sapiens
  source 1..23: mol_type = genomic DNA
ttacatttttgacctacatgtgg

SEQ ID NO: 6576 - DNA, 23 bp, Homo sapiens
  source 1..23: mol_type = genomic DNA
tgctacttcacaacagtaagcgg

SEQ ID NO: 6577 - DNA, 23 bp, Homo sapiens
  source 1..23: mol_type = genomic DNA
gaagttaagtctattctcaaagg

SEQ ID NO: 6578 - DNA, 23 bp, Homo sapiens
  source 1..23: mol_type = genomic DNA
gggaccatggcccagaacagggg

SEQ ID NO: 6579 - DNA, 23 bp, Homo sapiens
  source 1..23: mol_type = genomic DNA
gagataagtaagcagaggctggg

SEQ ID NO: 6580 - DNA, 23 bp, Homo sapiens
  source 1..23: mol_type = genomic DNA
gacaccatcactatatggaacgg

SEQ ID NO: 6581 - DNA, 23 bp, Homo sapiens
  source 1..23: mol_type = genomic DNA
ctaagcctattatttaggagtgg

SEQ ID NO: 6582 - DNA, 23 bp, Homo sapiens
  source 1..23: mol_type = genomic DNA
gctacttcacaacagtaagcggg

SEQ ID NO: 6583 - DNA, 23 bp, Homo sapiens
  source 1..23: mol_type = genomic DNA
gagaggggaagagaaagagcggg

SEQ ID NO: 6584 - DNA, 23 bp, Homo sapiens
  source 1..23: mol_type = genomic DNA
tttattttaatcactaccaaagg

SEQ ID NO: 6585 - DNA, 23 bp, Homo sapiens
  source 1..23: mol_type = genomic DNA
gatttgttattacaaccagctgg

SEQ ID NO: 6586 - DNA, 23 bp, Homo sapiens
  source 1..23: mol_type = genomic DNA
ctatgagacaatcaaatacatgg

SEQ ID NO: 6587 - DNA, 23 bp, Homo sapiens
  source 1..23: mol_type = genomic DNA
acttggctctggcaaccagctgg

SEQ ID NO: 6588 - DNA, 23 bp, Homo sapiens
  source 1..23: mol_type = genomic DNA
ataataggcttagttatcaaggg

SEQ ID NO: 6589 - DNA, 23 bp, Homo sapiens
  source 1..23: mol_type = genomic DNA
cagcccgttccatatagtgatgg

SEQ ID NO: 6590 - DNA, 23 bp, Homo sapiens
  source 1..23: mol_type = genomic DNA
agggaccatggcccagaacaggg

SEQ ID NO: 6591 - DNA, 23 bp, Homo sapiens
  source 1..23: mol_type = genomic DNA
tgatacacctcaaataaaagtgg

SEQ ID NO: 6592 - DNA, 23 bp, Homo sapiens
  source 1..23: mol_type = genomic DNA
taatcactaccaaaggaatgagg

SEQ ID NO: 6593 - DNA, 23 bp, Homo sapiens
  source 1..23: mol_type = genomic DNA
acttttactggacaattcaaggg

SEQ ID NO: 6594 - DNA, 23 bp, Homo sapiens
  source 1..23: mol_type = genomic DNA
cattgaacttgtgaaaactcagg

SEQ ID NO: 6595 - DNA, 23 bp, Homo sapiens
  source 1..23: mol_type = genomic DNA
ttttaatgaacgtggtggggggg

SEQ ID NO: 6596 - DNA, 23 bp, Homo sapiens
  source 1..23: mol_type = genomic DNA
agatgcggtatgttgcttgctgg

SEQ ID NO: 6597 - DNA, 23 bp, Homo sapiens
  source 1..23: mol_type = genomic DNA
tataccaaatgccactaagatgg

SEQ ID NO: 6598 - DNA, 23 bp, Homo sapiens
  source 1..23: mol_type = genomic DNA
taatctttgctgaaattcaaggg

SEQ ID NO: 6599 - DNA, 23 bp, Homo sapiens
  source 1..23: mol_type = genomic DNA
tggactagttcagatggagttgg

SEQ ID NO: 6600 - DNA, 23 bp, Homo sapiens
  source 1..23: mol_type = genomic DNA
aagcaataacagcgaggctgagg

SEQ ID NO: 6601 - DNA, 23 bp, Homo sapiens
  source 1..23: mol_type = genomic DNA
tgaatcacattcatcattggagg

SEQ ID NO: 6602 - DNA, 23 bp, Homo sapiens
  source 1..23: mol_type = genomic DNA
tgactgctgtttttactggtcgg

SEQ ID NO: 6603 - DNA, 23 bp, Homo sapiens
  source 1..23: mol_type = genomic DNA
aataaaaagatgactaacattgg

SEQ ID NO: 6604 - DNA, 23 bp, Homo sapiens
  source 1..23: mol_type = genomic DNA
tcaggtctcactgtctctaaagg

SEQ ID NO: 6605 - DNA, 23 bp, Homo sapiens
  source 1..23: mol_type = genomic DNA
tttttaagtcacctgagcatagg

SEQ ID NO: 6606 - DNA, 23 bp, Homo sapiens
  source 1..23: mol_type = genomic DNA
actaaataagtaggtcaagaagg

SEQ ID NO: 6607 - DNA, 23 bp, Homo sapiens
  source 1..23: mol_type = genomic DNA
atatagcttgcgttaaatgatgg

SEQ ID NO: 6608 - DNA, 23 bp, Homo sapiens
  source 1..23: mol_type = genomic DNA
aacttgaatttaaacttccacgg

SEQ ID NO: 6609 - DNA, 23 bp, Homo sapiens
  source 1..23: mol_type = genomic DNA
aggaaatatttatccctaagagg

SEQ ID NO: 6610 - DNA, 23 bp, Homo sapiens
  source 1..23: mol_type = genomic DNA
ggaatagaaatgaagagggtagg

SEQ ID NO: 6611 - DNA, 23 bp, Homo sapiens
  source 1..23: mol_type = genomic DNA
tttactcttttgatagtgaaggg

SEQ ID NO: 6612 - DNA, 23 bp, Homo sapiens
  source 1..23: mol_type = genomic DNA
ataaaagattagtagaatatggg

SEQ ID NO: 6613 - DNA, 23 bp, Homo sapiens
  source 1..23: mol_type = genomic DNA
agcctctcaaactattttgaggg

SEQ ID NO: 6614 - DNA, 23 bp, Homo sapiens
  source 1..23: mol_type = genomic DNA
ttccacggttaccatcttagtgg

SEQ ID NO: 6615 - DNA, 23 bp, Homo sapiens
  source 1..23: mol_type = genomic DNA
acaccatcactatatggaacggg

SEQ ID NO: 6616 - DNA, 23 bp, Homo sapiens
  source 1..23: mol_type = genomic DNA
caatgagtggaaaatattagtgg

SEQ ID NO: 6617 - DNA, 23 bp, Homo sapiens
  source 1..23: mol_type = genomic DNA
gcatgcttgagttcttctgctgg

SEQ ID NO: 6618 - DNA, 23 bp, Homo sapiens
  source 1..23: mol_type = genomic DNA
cttgttcattgaaagctagaagg

SEQ ID NO: 6619 - DNA, 23 bp, Homo sapiens
  source 1..23: mol_type = genomic DNA
cctgcagtcactgtacataaagg

SEQ ID NO: 6620 - DNA, 23 bp, Homo sapiens
  source 1..23: mol_type = genomic DNA
cggttggaatcagcagatagtgg

SEQ ID NO: 6621 - DNA, 23 bp, Homo sapiens
  source 1..23: mol_type = genomic DNA
caatgagtggataatattagtgg

SEQ ID NO: 6622 - DNA, 23 bp, Homo sapiens
  source 1..23: mol_type = genomic DNA
tagcctctcaaactattttgagg

SEQ ID NO: 6623 - DNA, 23 bp, Homo sapiens
  source 1..23: mol_type = genomic DNA
ctacatatgtacacctcttaggg

SEQ ID NO: 6624 - DNA, 23 bp, Homo sapiens
  source 1..23: mol_type = genomic DNA
tatttcttatcacgattaagtgg

SEQ ID NO: 6625 - DNA, 23 bp, Homo sapiens
  source 1..23: mol_type = genomic DNA
aatgaggctttctcagtcttggg

SEQ ID NO: 6626 - DNA, 23 bp, Homo sapiens
  source 1..23: mol_type = genomic DNA
gcatattttgtaacataggcagg

SEQ ID NO: 6627 - DNA, 23 bp, Homo sapiens
  source 1..23: mol_type = genomic DNA
atatggaacgggctgaaaatcgg

SEQ ID NO: 6628 - DNA, 23 bp, Homo sapiens
  source 1..23: mol_type = genomic DNA
ttgtgtcctgtgctaaattacgg

SEQ ID NO: 6629 - DNA, 23 bp, Homo sapiens
  source 1..23: mol_type = genomic DNA
cttcttccagcatctcataaggg

SEQ ID NO: 6630 - DNA, 23 bp, Homo sapiens
  source 1..23: mol_type = genomic DNA
ttgagaatagacttaacttctgg

SEQ ID NO: 6631 - DNA, 23 bp, Homo sapiens
  source 1..23: mol_type = genomic DNA
agtatgttgcattagaaaaaggg

SEQ ID NO: 6632 - DNA, 23 bp, Homo sapiens
  source 1..23: mol_type = genomic DNA
gttaccatcttagtggcatttgg

SEQ ID NO: 6633 - DNA, 23 bp, Homo sapiens
  source 1..23: mol_type = genomic DNA
acttagaatgagtacattgatgg

SEQ ID NO: 6634 - DNA, 23 bp, Homo sapiens
  source 1..23: mol_type = genomic DNA
gccacccctgttctgggccatgg

SEQ ID NO: 6635 - DNA, 23 bp, Homo sapiens
  source 1..23: mol_type = genomic DNA
ctttccttctgggaaggttaagg

SEQ ID NO: 6636 - DNA, 23 bp, Homo sapiens
  source 1..23: mol_type = genomic DNA
atacagttcagagtgccttttgg

SEQ ID NO: 6637 - DNA, 23 bp, Homo sapiens
  source 1..23: mol_type = genomic DNA
gacagtagaaaaacagtaatagg

SEQ ID NO: 6638 - DNA, 23 bp, Homo sapiens
  source 1..23: mol_type = genomic DNA
tatttgacaccatcactatatgg

SEQ ID NO: 6639 - DNA, 23 bp, Homo sapiens
  source 1..23: mol_type = genomic DNA
tgaattgtccagtaaaagtatgg

SEQ ID NO: 6640 - DNA, 23 bp, Homo sapiens
  source 1..23: mol_type = genomic DNA
acatggctgctgaatttaatagg

SEQ ID NO: 6641 - DNA, 23 bp, Homo sapiens
  source 1..23: mol_type = genomic DNA
ggatcatcacggtataaaatagg

SEQ ID NO: 6642 - DNA, 23 bp, Homo sapiens
  source 1..23: mol_type = genomic DNA
ataatccactcctaaataatagg

SEQ ID NO: 6643 - DNA, 23 bp, Homo sapiens
  source 1..23: mol_type = genomic DNA
gcatcaatctggtttagttctgg

SEQ ID NO: 6644 - DNA, 23 bp, Homo sapiens
  source 1..23: mol_type = genomic DNA
aagggcttctaccatttaatagg

SEQ ID NO: 6645 - DNA, 23 bp, Homo sapiens
  source 1..23: mol_type = genomic DNA
ataggttctggtacatttacagg

SEQ ID NO: 6646 - DNA, 23 bp, Homo sapiens
  source 1..23: mol_type = genomic DNA
ggcatttgttaacttctatatgg

SEQ ID NO: 6647 - DNA, 23 bp, Homo sapiens
  source 1..23: mol_type = genomic DNA
tattatgtctcattactaattgg

SEQ ID NO: 6648 - DNA, 23 bp, Homo sapiens
  source 1..23: mol_type = genomic DNA
tctatttgacctctgcaaaatgg

SEQ ID NO: 6649 - DNA, 23 bp, Homo sapiens
  source 1..23: mol_type = genomic DNA
catgatctggaaccatactgggg

SEQ ID NO: 6650 - DNA, 23 bp, Homo sapiens
  source 1..23: mol_type = genomic DNA
aatggaacgttagatcaatgtgg

SEQ ID NO: 6651 - DNA, 23 bp, Homo sapiens
  source 1..23: mol_type = genomic DNA
gcacaattaggaatgtcatgagg

SEQ ID NO: 6652 - DNA, 23 bp, Homo sapiens
  source 1..23: mol_type = genomic DNA
agcaacctgatttagaacagagg

SEQ ID NO: 6653 - DNA, 23 bp, Homo sapiens
  source 1..23: mol_type = genomic DNA
ggtcagggacagataaaacaggg

SEQ ID NO: 6654 - DNA, 23 bp, Homo sapiens
  source 1..23: mol_type = genomic DNA
tgccaaatacaaaaagaaggggg

SEQ ID NO: 6655 - DNA, 23 bp, Homo sapiens
  source 1..23: mol_type = genomic DNA
aaatggggaaggtaagacaaggg

SEQ ID NO: 6656 - DNA, 23 bp, Homo sapiens
  source 1..23: mol_type = genomic DNA
atatgtatcccatagaacactgg

SEQ ID NO: 6657 - DNA, 23 bp, Homo sapiens
  source 1..23: mol_type = genomic DNA
tattttgacagagaaagagtggg

SEQ ID NO: 6658 - DNA, 23 bp, Homo sapiens
  source 1..23: mol_type = genomic DNA
aaaacgttagagagccaacaagg

SEQ ID NO: 6659 - DNA, 23 bp, Homo sapiens
  source 1..23: mol_type = genomic DNA
aggttgctgagtaattcacctgg

SEQ ID NO: 6660 - DNA, 23 bp, Homo sapiens
  source 1..23: mol_type = genomic DNA
ggcaaagttagaatacaacctgg

SEQ ID NO: 6661 - DNA, 23 bp, Homo sapiens
  source 1..23: mol_type = genomic DNA
ggttaacattaaatgctgtgtgg

SEQ ID NO: 6662 - DNA, 23 bp, Homo sapiens
  source 1..23: mol_type = genomic DNA
gtgtgtgtatttgagagagaggg

SEQ ID NO: 6663 - DNA, 23 bp, Homo sapiens
  source 1..23: mol_type = genomic DNA
ggaagattctaagtatcaagtgg

SEQ ID NO: 6664 - DNA, 23 bp, Homo sapiens
  source 1..23: mol_type = genomic DNA
gtatcaatatgtttgacactggg

SEQ ID NO: 6665 - DNA, 23 bp, Homo sapiens
  source 1..23: mol_type = genomic DNA
agtaaaaaaaggacataggtggg

SEQ ID NO: 6666 - DNA, 23 bp, Homo sapiens
  source 1..23: mol_type = genomic DNA
ccatcatcagatacgtagtgtgg

SEQ ID NO: 6667 - DNA, 23 bp, Homo sapiens
  source 1..23: mol_type = genomic DNA
agccacatgcttaacactaaggg

SEQ ID NO: 6668 - DNA, 23 bp, Homo sapiens
  source 1..23: mol_type = genomic DNA
ttgtcaatgaaaattaagcatgg

SEQ ID NO: 6669 - DNA, 23 bp, Homo sapiens
  source 1..23: mol_type = genomic DNA
ggcataggaaaatggtagagtgg

SEQ ID NO: 6670 - DNA, 23 bp, Homo sapiens
  source 1..23: mol_type = genomic DNA
aattcacctggaaacccagtcgg

SEQ ID NO: 6671 - DNA, 23 bp, Homo sapiens
  source 1..23: mol_type = genomic DNA
ggggtattggaaaatatggaggg

SEQ ID NO: 6672 - DNA, 23 bp, Homo sapiens
  source 1..23: mol_type = genomic DNA
tcaatacagttagatgagaaggg

SEQ ID NO: 6673 - DNA, 23 bp, Homo sapiens
  source 1..23: mol_type = genomic DNA
gattctaagtatcaagtggtggg

SEQ ID NO: 6674 - DNA, 23 bp, Homo sapiens
  source 1..23: mol_type = genomic DNA
cgtgaaagtggttatagtggagg

SEQ ID NO: 6675 - DNA, 23 bp, Homo sapiens
  source 1..23: mol_type = genomic DNA
agattctaagtatcaagtggtgg

SEQ ID NO: 6676 - DNA, 23 bp, Homo sapiens
  source 1..23: mol_type = genomic DNA
ataagcttgttagctgttagggg

SEQ ID NO: 6677 - DNA, 23 bp, Homo sapiens
  source 1..23: mol_type = genomic DNA
cctatttgactggaatagtgtgg

SEQ ID NO: 6678 - DNA, 23 bp, Homo sapiens
  source 1..23: mol_type = genomic DNA
aataaggtaagttaagattgggg

SEQ ID NO: 6679 - DNA, 23 bp, Homo sapiens
  source 1..23: mol_type = genomic DNA
tctgccaaatacaaaaagaaggg

SEQ ID NO: 6680 - DNA, 23 bp, Homo sapiens
  source 1..23: mol_type = genomic DNA
atgttttgtaaaatctgaagcgg

SEQ ID NO: 6681 - DNA, 23 bp, Homo sapiens
  source 1..23: mol_type = genomic DNA
ggcccttagtgttaagcatgtgg

SEQ ID NO: 6682 - DNA, 23 bp, Homo sapiens
  source 1..23: mol_type = genomic DNA
acattagcggagcgtgaaagtgg

SEQ ID NO: 6683 - DNA, 23 bp, Homo sapiens
  source 1..23: mol_type = genomic DNA
gggatgaaacataatatggctgg

SEQ ID NO: 6684 - DNA, 23 bp, Homo sapiens
  source 1..23: mol_type = genomic DNA
cacatattattataaccagcagg

SEQ ID NO: 6685 - DNA, 23 bp, Homo sapiens
  source 1..23: mol_type = genomic DNA
tgtgccaacgacaatcgctatgg

SEQ ID NO: 6686 - DNA, 23 bp, Homo sapiens
  source 1..23: mol_type = genomic DNA
ctgggaatcccagtaaatccagg

SEQ ID NO: 6687 - DNA, 23 bp, Homo sapiens
  source 1..23: mol_type = genomic DNA
attcacctggaaacccagtcggg

SEQ ID NO: 6688 - DNA, 23 bp, Homo sapiens
  source 1..23: mol_type = genomic DNA
attgaagtcttccacttgaaggg

SEQ ID NO: 6689 - DNA, 23 bp, Homo sapiens
  source 1..23: mol_type = genomic DNA
caggagagagtatataaatgagg

SEQ ID NO: 6690 - DNA, 23 bp, Homo sapiens
  source 1..23: mol_type = genomic DNA
cgtttcatttacccaacccaggg

SEQ ID NO: 6691 - DNA, 23 bp, Homo sapiens
  source 1..23: mol_type = genomic DNA
tctagaagcaggattggcatagg

SEQ ID NO: 6692 - DNA, 23 bp, Homo sapiens
  source 1..23: mol_type = genomic DNA
tggggttaattaaatccagctgg

SEQ ID NO: 6693 - DNA, 23 bp, Homo sapiens
  source 1..23: mol_type = genomic DNA
gtaaaactaaccaactatgaagg

SEQ ID NO: 6694 - DNA, 23 bp, Homo sapiens
  source 1..23: mol_type = genomic DNA
cttctcatctaactgtattgagg

SEQ ID NO: 6695 - DNA, 23 bp, Homo sapiens
  source 1..23: mol_type = genomic DNA
acattgatctaacgttccattgg

SEQ ID NO: 6696 - DNA, 23 bp, Homo sapiens
  source 1..23: mol_type = genomic DNA
ctaacgtttttcccttcaagtgg

SEQ ID NO: 6697 - DNA, 23 bp, Homo sapiens
  source 1..23: mol_type = genomic DNA
ttaggcaatgcatttagccctgg

SEQ ID NO: 6698 - DNA, 23 bp, Homo sapiens
  source 1..23: mol_type = genomic DNA
ccacactacgtatctgatgatgg

SEQ ID NO: 6699 - DNA, 23 bp, Homo sapiens
  source 1..23: mol_type = genomic DNA
ataatttatcccaacagcactgg

SEQ ID NO: 6700 - DNA, 23 bp, Homo sapiens
  source 1..23: mol_type = genomic DNA
tgttgaaacattaacattagcgg

SEQ ID NO: 6701 - DNA, 23 bp, Homo sapiens
  source 1..23: mol_type = genomic DNA
cctgggttgggtaaatgaaacgg

SEQ ID NO: 6702 - DNA, 23 bp, Homo sapiens
  source 1..23: mol_type = genomic DNA
gctgagtttgcataaggtgttgg

SEQ ID NO: 6703 - DNA, 23 bp, Homo sapiens
  source 1..23: mol_type = genomic DNA
tcttaattagttcattccaatgg

SEQ ID NO: 6704 - DNA, 23 bp, Homo sapiens
  source 1..23: mol_type = genomic DNA
aactttgccgagaatggtgttgg

SEQ ID NO: 6705 - DNA, 23 bp, Homo sapiens
  source 1..23: mol_type = genomic DNA
tcatttttttctgtaggcaatgg

SEQ ID NO: 6706 - DNA, 23 bp, Homo sapiens
  source 1..23: mol_type = genomic DNA
ttaattaaccccatcccgactgg

SEQ ID NO: 6707 - DNA, 23 bp, Homo sapiens
  source 1..23: mol_type = genomic DNA
acttgtactttggttcctgctgg

SEQ ID NO: 6708 - DNA, 23 bp, Homo sapiens
  source 1..23: mol_type = genomic DNA
attaaaaatctggtgatccttgg

SEQ ID NO: 6709 - DNA, 23 bp, Homo sapiens
  source 1..23: mol_type = genomic DNA
actgtcagctacttgtactttgg

SEQ ID NO: 6710 - DNA, 23 bp, Homo sapiens
  source 1..23: mol_type = genomic DNA
aatccaagtgcaggaaactatgg

SEQ ID NO: 6711 - DNA, 23 bp, Homo sapiens
  source 1..23: mol_type = genomic DNA
ttaaatagaaatattttaaaggg

SEQ ID NO: 6712 - DNA, 23 bp, Homo sapiens
  source 1..23: mol_type = genomic DNA
gcaggattggcataggaaaatgg

SEQ ID NO: 6713 - DNA, 23 bp, Homo sapiens
  source 1..23: mol_type = genomic DNA
cctggggatgaaacataatatgg

SEQ ID NO: 6714 - DNA, 23 bp, Homo sapiens
  source 1..23: mol_type = genomic DNA
gtcaggtgtcttgctccagctgg

SEQ ID NO: 6715 - DNA, 23 bp, Homo sapiens
  source 1..23: mol_type = genomic DNA
cctaacagctaacaagcttatgg

SEQ ID NO: 6716 - DNA, 23 bp, Homo sapiens
  source 1..23: mol_type = genomic DNA
tatactctctcctgtcatattgg

SEQ ID NO: 6717 - DNA, 23 bp, Homo sapiens
  source 1..23: mol_type = genomic DNA
ggttgcaagtcaataaattatgg

SEQ ID NO: 6718 - DNA, 23 bp, Homo sapiens
  source 1..23: mol_type = genomic DNA
aggcttctaagaagtcactgtgg

SEQ ID NO: 6719 - DNA, 23 bp, Homo sapiens
  source 1..23: mol_type = genomic DNA
aaagaagttgaacctcatggcgg

SEQ ID NO: 6720 - DNA, 23 bp, Homo sapiens
  source 1..23: mol_type = genomic DNA
tgattaagccaaaatcacagagg

SEQ ID NO: 6721 - DNA, 23 bp, Homo sapiens
  source 1..23: mol_type = genomic DNA
gacaacggccaaaatcagtgtgg

SEQ ID NO: 6722 - DNA, 23 bp, Homo sapiens
  source 1..23: mol_type = genomic DNA
ttcacatcacgacctcactgagg

SEQ ID NO: 6723 - DNA, 23 bp, Homo sapiens
  source 1..23: mol_type = genomic DNA
taaggtacaactgtgtacggggg

SEQ ID NO: 6724 - DNA, 23 bp, Homo sapiens
  source 1..23: mol_type = genomic DNA
ccacccagtagatttccatgtgg

SEQ ID NO: 6725 - DNA, 23 bp, Homo sapiens
  source 1..23: mol_type = genomic DNA
agattgtacatagaaaactgagg

SEQ ID NO: 6726 - DNA, 23 bp, Homo sapiens
  source 1..23: mol_type = genomic DNA
ctacggatagaagtagaccaagg

SEQ ID NO: 6727 - DNA, 23 bp, Homo sapiens
  source 1..23: mol_type = genomic DNA
tcacgtcttgaagcaccaggtgg

SEQ ID NO: 6728 - DNA, 23 bp, Homo sapiens
  source 1..23: mol_type = genomic DNA
tttaacaaatcagcccctagggg

SEQ ID NO: 6729 - DNA, 23 bp, Homo sapiens
  source 1..23: mol_type = genomic DNA
aagcatgataagaatcatggagg

SEQ ID NO: 6730 - DNA, 23 bp, Homo sapiens
  source 1..23: mol_type = genomic DNA
ttgttacaagtagaaaacagtgg

SEQ ID NO: 6731 - DNA, 23 bp, Homo sapiens
  source 1..23: mol_type = genomic DNA
gtgtaagattgtgtctacagtgg

SEQ ID NO: 6732 - DNA, 23 bp, Homo sapiens
  source 1..23: mol_type = genomic DNA
gttatacttgatacacagtgagg

SEQ ID NO: 6733 - DNA, 23 bp, Homo sapiens
  source 1..23: mol_type = genomic DNA
tctgctgtttaactacagtgagg

SEQ ID NO: 6734 - DNA, 23 bp, Homo sapiens
  source 1..23: mol_type = genomic DNA
tagcagatctagcagctctgggg

SEQ ID NO: 6735 - DNA, 23 bp, Homo sapiens
  source 1..23: mol_type = genomic DNA
atatatgagagaaatcaacaagg

SEQ ID NO: 6736 - DNA, 23 bp, Homo sapiens
  source 1..23: mol_type = genomic DNA
tatgcatcacctctaccacaagg

SEQ ID NO: 6737 - DNA, 23 bp, Homo sapiens
  source 1..23: mol_type = genomic DNA
aatgagcagattatatactgggg

SEQ ID NO: 6738 - DNA, 23 bp, Homo sapiens
  source 1..23: mol_type = genomic DNA
tatgtacctaggacctaatgggg

SEQ ID NO: 6739 - DNA, 23 bp, Homo sapiens
  source 1..23: mol_type = genomic DNA
tgcttgcctagagcataacaggg

SEQ ID NO: 6740 - DNA, 23 bp, Homo sapiens
  source 1..23: mol_type = genomic DNA
tattggcattcacatcccagtgg

SEQ ID NO: 6741 - DNA, 23 bp, Homo sapiens
  source 1..23: mol_type = genomic DNA
taactgaaaactgaaaccagtgg

SEQ ID NO: 6742 - DNA, 23 bp, Homo sapiens
  source 1..23: mol_type = genomic DNA
ctaagcgtctgcatacctggggg

SEQ ID NO: 6743 - DNA, 23 bp, Homo sapiens
  source 1..23: mol_type = genomic DNA
gctcatctggacaatcacaaggg

SEQ ID NO: 6744 - DNA, 23 bp, Homo sapiens
  source 1..23: mol_type = genomic DNA
tttgccttcagaccgccatgagg

SEQ ID NO: 6745 - DNA, 23 bp, Homo sapiens
  source 1..23: mol_type = genomic DNA
actggacatagctaatcacacgg

SEQ ID NO: 6746 - DNA, 23 bp, Homo sapiens
  source 1..23: mol_type = genomic DNA
gcagatgtgtgaacatctggagg

SEQ ID NO: 6747 - DNA, 23 bp, Homo sapiens
  source 1..23: mol_type = genomic DNA
aagctgttcattgtgtacagcgg

SEQ ID NO: 6748 - DNA, 23 bp, Homo sapiens
  source 1..23: mol_type = genomic DNA
ataacatcaagagaacacactgg

SEQ ID NO: 6749 - DNA, 23 bp, Homo sapiens
  source 1..23: mol_type = genomic DNA
ttttttgctgaaactaaacgagg

SEQ ID NO: 6750 - DNA, 23 bp, Homo sapiens
  source 1..23: mol_type = genomic DNA
tcaaacctaaggatggtgggggg

SEQ ID NO: 6751 - DNA, 23 bp, Homo sapiens
  source 1..23: mol_type = genomic DNA
gaaaacgagaccataagcagtgg

SEQ ID NO: 6752 - DNA, 23 bp, Homo sapiens
  source 1..23: mol_type = genomic DNA
agaacatccataataacacaagg

SEQ ID NO: 6753 - DNA, 23 bp, Homo sapiens
  source 1..23: mol_type = genomic DNA
gctactctcctccctcaaagcgg

SEQ ID NO: 6754 - DNA, 23 bp, Homo sapiens
  source 1..23: mol_type = genomic DNA
attgcagtaagagtaaatggggg

SEQ ID NO: 6755 - DNA, 23 bp, Homo sapiens
  source 1..23: mol_type = genomic DNA
atgtggttgaaatgtgaccatgg

SEQ ID NO: 6756 - DNA, 23 bp, Homo sapiens
  source 1..23: mol_type = genomic DNA
tctgtaagataaaaacatggagg

SEQ ID NO: 6757 - DNA, 23 bp, Homo sapiens
  source 1..23: mol_type = genomic DNA
tatttatatagagcactaggagg

SEQ ID NO: 6758 - DNA, 23 bp, Homo sapiens
  source 1..23: mol_type = genomic DNA
tatgtgggatggtgtcatggtgg

SEQ ID NO: 6759 - DNA, 23 bp, Homo sapiens
  source 1..23: mol_type = genomic DNA
cctgatgaccagaaacccagggg

SEQ ID NO: 6760 - DNA, 23 bp, Homo sapiens
  source 1..23: mol_type = genomic DNA
aaccacagaatgctttacagagg

SEQ ID NO: 6761 - DNA, 23 bp, Homo sapiens
  source 1..23: mol_type = genomic DNA
tgtggtgctgtagagatatgggg

SEQ ID NO: 6762 - DNA, 23 bp, Homo sapiens
  source 1..23: mol_type = genomic DNA
cagacctgcccttatcttggggg

SEQ ID NO: 6763 - DNA, 23 bp, Homo sapiens
  source 1..23: mol_type = genomic DNA
gcagtgcagagggtttgtggtgg

SEQ ID NO: 6764 - DNA, 23 bp, Homo sapiens
  source 1..23: mol_type = genomic DNA
acttctgtaagataaaaacatgg

SEQ ID NO: 6765 - DNA, 23 bp, Homo sapiens
  source 1..23: mol_type = genomic DNA
gtaagtgtgtgtactatgagggg

SEQ ID NO: 6766 - DNA, 23 bp, Homo sapiens
  source 1..23: mol_type = genomic DNA
taatgagaaatgcagccatgagg

SEQ ID NO: 6767 - DNA, 23 bp, Homo sapiens
  source 1..23: mol_type = genomic DNA
aatgccaagaaaagtgaccgtgg

SEQ ID NO: 6768 - DNA, 23 bp, Homo sapiens
  source 1..23: mol_type = genomic DNA
gactactattaaattaactgggg

SEQ ID NO: 6769 - DNA, 23 bp, Homo sapiens
  source 1..23: mol_type = genomic DNA
ggtttccaaaacctgacacaggg

SEQ ID NO: 6770 - DNA, 23 bp, Homo sapiens
  source 1..23: mol_type = genomic DNA
atttgaatatagacctcacatgg

SEQ ID NO: 6771 - DNA, 23 bp, Homo sapiens
  source 1..23: mol_type = genomic DNA
atactgcaaactaaggacgtagg

SEQ ID NO: 6772 - DNA, 23 bp, Homo sapiens
  source 1..23: mol_type = genomic DNA
agtgggatagtaatagtttgggg

SEQ ID NO: 6773 - DNA, 23 bp, Homo sapiens
  source 1..23: mol_type = genomic DNA
tggctaatcggacttccctgagg

SEQ ID NO: 6774 - DNA, 23 bp, Homo sapiens
  source 1..23: mol_type = genomic DNA
aatgggtacagaacacatggtgg

SEQ ID NO: 6775 - DNA, 23 bp, Homo sapiens
  source 1..23: mol_type = genomic DNA
ataaactatttatgacactgcgg

SEQ ID NO: 6776 - DNA, 23 bp, Homo sapiens
  source 1..23: mol_type = genomic DNA
agtaatgggactaagaccggagg

SEQ ID NO: 6777 - DNA, 23 bp, Homo sapiens
  source 1..23: mol_type = genomic DNA
gccttgagaattgagaacagagg

SEQ ID NO: 6778 - DNA, 23 bp, Homo sapiens
  source 1..23: mol_type = genomic DNA
taggtgttacgagtgttgagtgg

SEQ ID NO: 6779 - DNA, 23 bp, Homo sapiens
  source 1..23: mol_type = genomic DNA
acgtaaatgttatttcccagtgg

SEQ ID NO: 6780 - DNA, 23 bp, Homo sapiens
  source 1..23: mol_type = genomic DNA
gttggagtatactccctgtgtgg

SEQ ID NO: 6781 - DNA, 23 bp, Homo sapiens
  source 1..23: mol_type = genomic DNA
gtgccaggtaagaagcgtagagg

SEQ ID NO: 6782 - DNA, 23 bp, Homo sapiens
  source 1..23: mol_type = genomic DNA
gatgccataaatgactggagtgg

SEQ ID NO: 6783 - DNA, 23 bp, Homo sapiens
  source 1..23: mol_type = genomic DNA
aaactatttatgacactgcgggg

SEQ ID NO: 6784 - DNA, 23 bp, Homo sapiens
  source 1..23: mol_type = genomic DNA
atacagtgcaaaatacaaagagg

SEQ ID NO: 6785 - DNA, 23 bp, Homo sapiens
  source 1..23: mol_type = genomic DNA
gtattcttaggttttgcgggggg

SEQ ID NO: 6786 - DNA, 23 bp, Homo sapiens
  source 1..23: mol_type = genomic DNA
actatgatccatgatatgagagg

SEQ ID NO: 6787 - DNA, 23 bp, Homo sapiens
  source 1..23: mol_type = genomic DNA
aatgagtaaccatccaacagagg

SEQ ID NO: 6788 - DNA, 23 bp, Homo sapiens
  source 1..23: mol_type = genomic DNA
ttaaagagattatagcaactggg

SEQ ID NO: 6789 - DNA, 23 bp, Homo sapiens
  source 1..23: mol_type = genomic DNA
taaggtgatataaaacctagagg

SEQ ID NO: 6790 - DNA, 23 bp, Homo sapiens
  source 1..23: mol_type = genomic DNA
ctattactatgcctataatgcgg

SEQ ID NO: 6791 - DNA, 23 bp, Homo sapiens
  source 1..23: mol_type = genomic DNA
atatagaaatgcatctaaggggg

SEQ ID NO: 6792 - DNA, 23 bp, Homo sapiens
  source 1..23: mol_type = genomic DNA
agacgaatgtagtatgtctgggg

SEQ ID NO: 6793 - DNA, 23 bp, Homo sapiens
  source 1..23: mol_type = genomic DNA
tgagcatcaacctccccacaggg

SEQ ID NO: 6794 - DNA, 23 bp, Homo sapiens
  source 1..23: mol_type = genomic DNA
actctggcaaagtttcagaaggg

SEQ ID NO: 6795 - DNA, 23 bp, Homo sapiens
  source 1..23: mol_type = genomic DNA
aaaagagacagccagaagtgggg

SEQ ID NO: 6796 - DNA, 23 bp, Homo sapiens
  source 1..23: mol_type = genomic DNA
agttggaaaagtgaaatcggtgg

SEQ ID NO: 6797 - DNA, 23 bp, Homo sapiens
  source 1..23: mol_type = genomic DNA
agtggaatagtaatagttggggg

SEQ ID NO: 6798 - DNA, 23 bp, Homo sapiens
  source 1..23: mol_type = genomic DNA
taagaaaatcgtggtcccagtgg

SEQ ID NO: 6799 - DNA, 23 bp, Homo sapiens
  source 1..23: mol_type = genomic DNA
ctcttctttagatttcccagcgg

SEQ ID NO: 6800 - DNA, 23 bp, Homo sapiens
  source 1..23: mol_type = genomic DNA
gtaggaatagagcctaccagtgg

SEQ ID NO: 6801 - DNA, 23 bp, Homo sapiens
  source 1..23: mol_type = genomic DNA
tgttaagaaactcaatacagagg

SEQ ID NO: 6802 - DNA, 23 bp, Homo sapiens
  source 1..23: mol_type = genomic DNA
gtggaatagtaatagttgggggg

SEQ ID NO: 6803 - DNA, 23 bp, Homo sapiens
  source 1..23: mol_type = genomic DNA
ttaaatatgaaatagtaacatgg

SEQ ID NO: 6804 - DNA, 23 bp, Homo sapiens
  source 1..23: mol_type = genomic DNA
taggccagcagtactatggtggg

SEQ ID NO: 6805 - DNA, 23 bp, Homo sapiens
  source 1..23: mol_type = genomic DNA
atatcttaaattcctcagagtgg

SEQ ID NO: 6806 - DNA, 23 bp, Homo sapiens
  source 1..23: mol_type = genomic DNA
taggtaagaggaaaaatgcgagg

SEQ ID NO: 6807 - DNA, 23 bp, Homo sapiens
  source 1..23: mol_type = genomic DNA
tggaaggcaagcctgtagagagg

SEQ ID NO: 6808 - DNA, 23 bp, Homo sapiens
  source 1..23: mol_type = genomic DNA
ttttgtttagaaagaacatgggg

SEQ ID NO: 6809 - DNA, 23 bp, Homo sapiens
  source 1..23: mol_type = genomic DNA
atagttttagtgagatgacaagg

SEQ ID NO: 6810 - DNA, 23 bp, Homo sapiens
  source 1..23: mol_type = genomic DNA
actaagaaagagcactccagagg

SEQ ID NO: 6811 - DNA, 23 bp, Homo sapiens
  source 1..23: mol_type = genomic DNA
ctttagtgtattcatatgtgagg

SEQ ID NO: 6812 - DNA, 23 bp, Homo sapiens
  source 1..23: mol_type = genomic DNA
ccagctagtaagcacactcaggg

SEQ ID NO: 6813 - DNA, 23 bp, Homo sapiens
  source 1..23: mol_type = genomic DNA
acttcacgtcttgaagcaccagg

SEQ ID NO: 6814 - DNA, 23 bp, Homo sapiens
  source 1..23: mol_type = genomic DNA
aggtagagctctactagcagggg

SEQ ID NO: 6815 - DNA, 23 bp, Homo sapiens
  source 1..23: mol_type = genomic DNA
ttcctaatacaaaccctgtgggg

SEQ ID NO: 6816 - DNA, 23 bp, Homo sapiens
  source 1..23: mol_type = genomic DNA
agaaattgcatatattccagggg

SEQ ID NO: 6817 - DNA, 23 bp, Homo sapiens
  source 1..23: mol_type = genomic DNA
ataggcatttccaaagactgtgg

SEQ ID NO: 6818 - DNA, 23 bp, Homo sapiens
  source 1..23: mol_type = genomic DNA
ggaaagctttcctaatcaagggg

SEQ ID NO: 6819 - DNA, 23 bp, Homo sapiens
  source 1..23: mol_type = genomic DNA
tattttggagagtcatcacaggg

SEQ ID NO: 6820 - DNA, 23 bp, Homo sapiens
  source 1..23: mol_type = genomic DNA
cttctcttaagattccacaatgg

SEQ ID NO: 6821 - DNA, 23 bp, Homo sapiens
  source 1..23: mol_type = genomic DNA
aatggcctgctaaagggcaaggg

SEQ ID NO: 6822 - DNA, 23 bp, Homo sapiens
  source 1..23: mol_type = genomic DNA
ataatttctatctcccctagggg

SEQ ID NO: 6823 - DNA, 23 bp, Homo sapiens
  source 1..23: mol_type = genomic DNA
gcttaagtgattgtcacctgcgg

SEQ ID NO: 6824 - DNA, 23 bp, Homo sapiens
  source 1..23: mol_type = genomic DNA
tattttctaagcactactggagg

SEQ ID NO: 6825 - DNA, 23 bp, Homo sapiens
  source 1..23: mol_type = genomic DNA
ctatatgaccatggtccaggagg

SEQ ID NO: 6826 - DNA, 23 bp, Homo sapiens
  source 1..23: mol_type = genomic DNA
gagtatgatcttctataacacgg

SEQ ID NO: 6827 - DNA, 23 bp, Homo sapiens
  source 1..23: mol_type = genomic DNA
atatgttgccaagaaatcagagg

SEQ ID NO: 6828 - DNA, 23 bp, Homo sapiens
  source 1..23: mol_type = genomic DNA
tcaaaaaggttaagaacccgagg

SEQ ID NO: 6829 - DNA, 23 bp, Homo sapiens
  source 1..23: mol_type = genomic DNA
gtaaaaacgttgtctcagcaggg

SEQ ID NO: 6830 - DNA, 23 bp, Homo sapiens
  source 1..23: mol_type = genomic DNA
gtaggagtgttatcatactgagg

SEQ ID NO: 6831 - DNA, 23 bp, Homo sapiens
  source 1..23: mol_type = genomic DNA
ttctgaaaatcataaagacaggg

SEQ ID NO: 6832 - DNA, 23 bp, Homo sapiens
  source 1..23: mol_type = genomic DNA
cattgcataccatttagctgggg

SEQ ID NO: 6833 - DNA, 23 bp, Homo sapiens
  source 1..23: mol_type = genomic DNA
atgggtacagaacacatggtggg

SEQ ID NO: 6834 - DNA, 23 bp, Homo sapiens
  source 1..23: mol_type = genomic DNA
taggaatagagcctaccagtggg

SEQ ID NO: 6835 - DNA, 23 bp, Homo sapiens
  source 1..23: mol_type = genomic DNA
tttgtcctatgtgacaacaatgg

SEQ ID NO: 6836 - DNA, 23 bp, Homo sapiens
  source 1..23: mol_type = genomic DNA
agtggcctaaaagttagaagagg

SEQ ID NO: 6837 - DNA, 23 bp, Homo sapiens
  source 1..23: mol_type = genomic DNA
agttagtacccatagaggtgagg

SEQ ID NO: 6838 - DNA, 23 bp, Homo sapiens
  source 1..23: mol_type = genomic DNA
ccaccagctgagtctatctgtgg

SEQ ID NO: 6839 - DNA, 23 bp, Homo sapiens
  source 1..23: mol_type = genomic DNA
tattgtcacataaataagagagg

SEQ ID NO: 6840 - DNA, 23 bp, Homo sapiens
  source 1..23: mol_type = genomic DNA
gtaaaactaagaaacgtcagtgg

SEQ ID NO: 6841 - DNA, 23 bp, Homo sapiens
  source 1..23: mol_type = genomic DNA
agtcagatcaacttaatgtgcgg

SEQ ID NO: 6842 - DNA, 23 bp, Homo sapiens
  source 1..23: mol_type = genomic DNA
tgtttgggacagctactccaggg

SEQ ID NO: 6843 - DNA, 23 bp, Homo sapiens
  source 1..23: mol_type = genomic DNA
ttgcagtaagagtaaatgggggg

SEQ ID NO: 6844 - DNA, 23 bp, Homo sapiens
  source 1..23: mol_type = genomic DNA
tttttaacaaaaacttacaaggg

SEQ ID NO: 6845 - DNA, 23 bp, Homo sapiens
  source 1..23: mol_type = genomic DNA
tatgctaaaacatatacctgtgg

SEQ ID NO: 6846 - DNA, 23 bp, Homo sapiens
  source 1..23: mol_type = genomic DNA
aactgaagaaggcctgacgttgg

SEQ ID NO: 6847 - DNA, 23 bp, Homo sapiens
  source 1..23: mol_type = genomic DNA
aaatagtattgagtgatgggtgg

SEQ ID NO: 6848 - DNA, 23 bp, Homo sapiens
  source 1..23: mol_type = genomic DNA
atggtataagggcagtcctgggg

SEQ ID NO: 6849 - DNA, 23 bp, Homo sapiens
  source 1..23: mol_type = genomic DNA
gtaatgggactaagaccggaggg

SEQ ID NO: 6850 - DNA, 23 bp, Homo sapiens
  source 1..23: mol_type = genomic DNA
aagctgaatgattctccaagagg

SEQ ID NO: 6851 - DNA, 23 bp, Homo sapiens
  source 1..23: mol_type = genomic DNA
agcagggatacagtggcaagtgg

SEQ ID NO: 6852 - DNA, 23 bp, Homo sapiens
  source 1..23: mol_type = genomic DNA
aactgacaataaaacaaaggagg

SEQ ID NO: 6853 - DNA, 23 bp, Homo sapiens
  source 1..23: mol_type = genomic DNA
attcttaactcacaagagagtgg

SEQ ID NO: 6854 - DNA, 23 bp, Homo sapiens
  source 1..23: mol_type = genomic DNA
tgtcttactctacattcaggggg

SEQ ID NO: 6855 - DNA, 23 bp, Homo sapiens
  source 1..23: mol_type = genomic DNA
taaaactatgagtcagcggtggg

SEQ ID NO: 6856 - DNA, 23 bp, Homo sapiens
  source 1..23: mol_type = genomic DNA
ttctttactgagaaccaaagcgg

SEQ ID NO: 6857 - DNA, 23 bp, Homo sapiens
  source 1..23: mol_type = genomic DNA
tcttcaaacactaattgtggtgg

SEQ ID NO: 6858 - DNA, 23 bp, Homo sapiens
  source 1..23: mol_type = genomic DNA
tgactattcatgtgacacaaagg

SEQ ID NO: 6859 - DNA, 23 bp, Homo sapiens
  source 1..23: mol_type = genomic DNA
ccaagatcagagcccatatgggg

SEQ ID NO: 6860 - DNA, 23 bp, Homo sapiens
  source 1..23: mol_type = genomic DNA
tttcactgctcagcaatatgcgg

SEQ ID NO: 6861 - DNA, 23 bp, Homo sapiens
  source 1..23: mol_type = genomic DNA
ttgggaggtcctaattacaatgg

SEQ ID NO: 6862 - DNA, 23 bp, Homo sapiens
  source 1..23: mol_type = genomic DNA
catgtagctcacatatcccatgg

SEQ ID NO: 6863 - DNA, 23 bp, Homo sapiens
  source 1..23: mol_type = genomic DNA
tcataaataaaactatctggtgg

SEQ ID NO: 6864 - DNA, 23 bp, Homo sapiens
  source 1..23: mol_type = genomic DNA
taaacttaggacaattgtgacgg

SEQ ID NO: 6865 - DNA, 23 bp, Homo sapiens
  source 1..23: mol_type = genomic DNA
tacgctcctttcagagactgtgg

SEQ ID NO: 6866 - DNA, 23 bp, Homo sapiens
  source 1..23: mol_type = genomic DNA
acttcctgagaatggtgacacgg

SEQ ID NO: 6867 - DNA, 23 bp, Homo sapiens
  source 1..23: mol_type = genomic DNA
gctagtagagctctacctgaggg

SEQ ID NO: 6868 - DNA, 23 bp, Homo sapiens
  source 1..23: mol_type = genomic DNA
tgggagacaagcagatacatggg

SEQ ID NO: 6869 - DNA, 23 bp, Homo sapiens
  source 1..23: mol_type = genomic DNA
ggcctgcatcagagtcatcaggg

SEQ ID NO: 6870 - DNA, 23 bp, Homo sapiens
  source 1..23: mol_type = genomic DNA
ttagaaattataatcccactggg

SEQ ID NO: 6871 - DNA, 23 bp, Homo sapiens
  source 1..23: mol_type = genomic DNA
attggcattcacatcccagtggg

SEQ ID NO: 6872 - DNA, 23 bp, Homo sapiens
  source 1..23: mol_type = genomic DNA
attcctaaggaagaaacgagtgg

SEQ ID NO: 6873 - DNA, 23 bp, Homo sapiens
  source 1..23: mol_type = genomic DNA
agaatgaggttaaggtaccatgg

SEQ ID NO: 6874 - DNA, 23 bp, Homo sapiens
  source 1..23: mol_type = genomic DNA
agtacataaataaagacatgagg

SEQ ID NO: 6875 - DNA, 23 bp, Homo sapiens
  source 1..23: mol_type = genomic DNA
gaaaacttgagagaaataggagg

SEQ ID NO: 6876 - DNA, 23 bp, Homo sapiens
  source 1..23: mol_type = genomic DNA
gaactgataacaatgttgctcgg

SEQ ID NO: 6877 - DNA, 23 bp, Homo sapiens
  source 1..23: mol_type = genomic DNA
aattagtaacaagatgagagagg

SEQ ID NO: 6878 - DNA, 23 bp, Homo sapiens
  source 1..23: mol_type = genomic DNA
tggtggtttccctaacacaatgg

SEQ ID NO: 6879 - DNA, 23 bp, Homo sapiens
  source 1..23: mol_type = genomic DNA
tatgaattatggttgcaggaggg

SEQ ID NO: 6880 - DNA, 23 bp, Homo sapiens
  source 1..23: mol_type = genomic DNA
aattggcctataatacacctcgg

SEQ ID NO: 6881 - DNA, 23 bp, Homo sapiens
  source 1..23: mol_type = genomic DNA
attctatgttaagaaaatcgtgg

SEQ ID NO: 6882 - DNA, 23 bp, Homo sapiens
  source 1..23: mol_type = genomic DNA
ttgtctaggcccttaccaagagg

SEQ ID NO: 6883 - DNA, 23 bp, Homo sapiens
  source 1..23: mol_type = genomic DNA
taagtatacctcctggaccatgg

SEQ ID NO: 6884 - DNA, 23 bp, Homo sapiens
  source 1..23: mol_type = genomic DNA
catctccacatacatagcagtgg

SEQ ID NO: 6885 - DNA, 23 bp, Homo sapiens
  source 1..23: mol_type = genomic DNA
actgaactcttagagagcagtgg

SEQ ID NO: 6886 - DNA, 23 bp, Homo sapiens
  source 1..23: mol_type = genomic DNA
gcatgtggaaatctgtatgttgg

SEQ ID NO: 6887 - DNA, 23 bp, Homo sapiens
  source 1..23: mol_type = genomic DNA
gtgtcttactctacattcagggg

SEQ ID NO: 6888 - DNA, 23 bp, Homo sapiens
  source 1..23: mol_type = genomic DNA
tatatgagagaaatcaacaaggg

SEQ ID NO: 6889 - DNA, 23 bp, Homo sapiens
  source 1..23: mol_type = genomic DNA
aaatccctggataggccaggtgg

SEQ ID NO: 6890 - DNA, 23 bp, Homo sapiens
  source 1..23: mol_type = genomic DNA
tgttttctcttagttcagtgagg

SEQ ID NO: 6891 - DNA, 23 bp, Homo sapiens
  source 1..23: mol_type = genomic DNA
gaatcatagacatacttcaaggg

SEQ ID NO: 6892 - DNA, 23 bp, Homo sapiens
  source 1..23: mol_type = genomic DNA
agactaagaataaaaagtagggg

SEQ ID NO: 6893 - DNA, 23 bp, Homo sapiens
  source 1..23: mol_type = genomic DNA
gccatgagcagaaaaagagtagg

SEQ ID NO: 6894 - DNA, 23 bp, Homo sapiens
  source 1..23: mol_type = genomic DNA
gactcttgcttgatatagggggg

SEQ ID NO: 6895 - DNA, 23 bp, Homo sapiens
  source 1..23: mol_type = genomic DNA
tagcactcctcagtactaccagg

SEQ ID NO: 6896 - DNA, 23 bp, Homo sapiens
  source 1..23: mol_type = genomic DNA
gcctctgctctatatgaccatgg

SEQ ID NO: 6897 - DNA, 23 bp, Homo sapiens
  source 1..23: mol_type = genomic DNA
tcacattgtttgcccccatgggg

SEQ ID NO: 6898 - DNA, 23 bp, Homo sapiens
  source 1..23: mol_type = genomic DNA
gatatcaattggctgaacaaggg

SEQ ID NO: 6899 - DNA, 23 bp, Homo sapiens
  source 1..23: mol_type = genomic DNA
tagcgatgtcttggcaacagtgg

SEQ ID NO: 6900 - DNA, 23 bp, Homo sapiens
  source 1..23: mol_type = genomic DNA
gattaagccaaaatcacagaggg

SEQ ID NO: 6901 - DNA, 23 bp, Homo sapiens
  source 1..23: mol_type = genomic DNA
ttcctgttgattagggcacacgg

SEQ ID NO: 6902 - DNA, 23 bp, Homo sapiens
  source 1..23: mol_type = genomic DNA
tataggatgatctaagaactcgg

SEQ ID NO: 6903 - DNA, 23 bp, Homo sapiens
  source 1..23: mol_type = genomic DNA
atgttcttacttatttaccaggg

SEQ ID NO: 6904 - DNA, 23 bp, Homo sapiens
  source 1..23: mol_type = genomic DNA
ttgattttacttcaacctagagg

SEQ ID NO: 6905 - DNA, 23 bp, Homo sapiens
  source 1..23: mol_type = genomic DNA
aagacagtgactaaaggcaatgg

SEQ ID NO: 6906 - DNA, 23 bp, Homo sapiens
  source 1..23: mol_type = genomic DNA
tctcttaccataaacccacctgg

SEQ ID NO: 6907 - DNA, 23 bp, Homo sapiens
  source 1..23: mol_type = genomic DNA
tcaatgaagcagggatacagtgg

SEQ ID NO: 6908 - DNA, 23 bp, Homo sapiens
  source 1..23: mol_type = genomic DNA
ttctttctacgtttacaaggggg

SEQ ID NO: 6909 - DNA, 23 bp, Homo sapiens
  source 1..23: mol_type = genomic DNA
atgaatgtgctcatgtgcatggg

SEQ ID NO: 6910 - DNA, 23 bp, Homo sapiens
  source 1..23: mol_type = genomic DNA
acaccttcctatatctgggtagg

SEQ ID NO: 6911 - DNA, 23 bp, Homo sapiens
  source 1..23: mol_type = genomic DNA
cctaacttcatatgaaacacggg

SEQ ID NO: 6912 - DNA, 23 bp, Homo sapiens
  source 1..23: mol_type = genomic DNA
gattgtacatagaaaactgaggg

SEQ ID NO: 6913 - DNA, 23 bp, Homo sapiens
  source 1..23: mol_type = genomic DNA
acacagcagtgaataggcacagg

SEQ ID NO: 6914 - DNA, 23 bp, Homo sapiens
  source 1..23: mol_type = genomic DNA
aatcaaagtgaaacatgagaagg

SEQ ID NO: 6915 - DNA, 23 bp, Homo sapiens
  source 1..23: mol_type = genomic DNA
tggcagtgtagtgcaatgactgg

SEQ ID NO: 6916 - DNA, 23 bp, Homo sapiens
  source 1..23: mol_type = genomic DNA
atttctagcaagtctcctgaagg

SEQ ID NO: 6917 - DNA, 23 bp, Homo sapiens
  source 1..23: mol_type = genomic DNA
gagcacacatccccttcatgtgg

SEQ ID NO: 6918 - DNA, 23 bp, Homo sapiens
  source 1..23: mol_type = genomic DNA
catgcattgaaccaaaactcagg

SEQ ID NO: 6919 - DNA, 23 bp, Homo sapiens
  source 1..23: mol_type = genomic DNA
ctggaagacaagctaagagaggg

SEQ ID NO: 6920 - DNA, 23 bp, Homo sapiens
  source 1..23: mol_type = genomic DNA
ggtatgtaacttctaaacccagg

SEQ ID NO: 6921 - DNA, 23 bp, Homo sapiens
  source 1..23: mol_type = genomic DNA
ccttcaactgtggaaacccaagg

SEQ ID NO: 6922 - DNA, 23 bp, Homo sapiens
  source 1..23: mol_type = genomic DNA
gaaaacaagttggttacaggagg

SEQ ID NO: 6923 - DNA, 23 bp, Homo sapiens
  source 1..23: mol_type = genomic DNA
agaaggtagagccacaacaaagg

SEQ ID NO: 6924 - DNA, 23 bp, Homo sapiens
  source 1..23: mol_type = genomic DNA
gtttcccaaattgatccacaagg

SEQ ID NO: 6925 - DNA, 23 bp, Homo sapiens
  source 1..23: mol_type = genomic DNA
attttatgaaatgagagcagtgg

SEQ ID NO: 6926 - DNA, 23 bp, Homo sapiens
  source 1..23: mol_type = genomic DNA
atacgcaacatcagaataagggg

SEQ ID NO: 6927 - DNA, 23 bp, Homo sapiens
  source 1..23: mol_type = genomic DNA
agcactctcttaatatagggagg

SEQ ID NO: 6928 - DNA, 23 bp, Homo sapiens
  source 1..23: mol_type = genomic DNA
gaaggcaattcaatgaagcaggg

SEQ ID NO: 6929 - DNA, 23 bp, Homo sapiens
  source 1..23: mol_type = genomic DNA
cagtaaaatcaataataaagggg

SEQ ID NO: 6930 - DNA, 23 bp, Homo sapiens
  source 1..23: mol_type = genomic DNA
catattacatgaaagtgtgaggg

SEQ ID NO: 6931 - DNA, 23 bp, Homo sapiens
  source 1..23: mol_type = genomic DNA
tggaattcaaaactgccagtagg

SEQ ID NO: 6932 - DNA, 23 bp, Homo sapiens
  source 1..23: mol_type = genomic DNA
gtaacaacaataaagaattgtgg

SEQ ID NO: 6933 - DNA, 23 bp, Homo sapiens
  source 1..23: mol_type = genomic DNA
aatgaaactctatcaaccgatgg

SEQ ID NO: 6934 - DNA, 23 bp, Homo sapiens
  source 1..23: mol_type = genomic DNA
tggtttccaaaacctgacacagg

SEQ ID NO: 6935 - DNA, 23 bp, Homo sapiens
  source 1..23: mol_type = genomic DNA
gtgtacggcaccatagtcaaggg

SEQ ID NO: 6936 - DNA, 23 bp, Homo sapiens
  source 1..23: mol_type = genomic DNA
gtttcctaatacaaaccctgtgg

SEQ ID NO: 6937 - DNA, 23 bp, Homo sapiens
  source 1..23: mol_type = genomic DNA
ccactcatagtaagccacacagg

SEQ ID NO: 6938 - DNA, 23 bp, Homo sapiens
  source 1..23: mol_type = genomic DNA
gacatggttgattcatggagcgg

SEQ ID NO: 6939 - DNA, 23 bp, Homo sapiens
  source 1..23: mol_type = genomic DNA
gcctaacgtttactagatgtagg

SEQ ID NO: 6940 - DNA, 23 bp, Homo sapiens
  source 1..23: mol_type = genomic DNA
cgttcccattgagataagagtgg

SEQ ID NO: 6941 - DNA, 23 bp, Homo sapiens
  source 1..23: mol_type = genomic DNA
ggaccattggacaaaccagatgg

SEQ ID NO: 6942 - DNA, 23 bp, Homo sapiens
  source 1..23: mol_type = genomic DNA
ttaccatataaattaccaagagg

SEQ ID NO: 6943 - DNA, 23 bp, Homo sapiens
  source 1..23: mol_type = genomic DNA
attggtgcctctttatatcgggg

SEQ ID NO: 6944 - DNA, 23 bp, Homo sapiens
  source 1..23: mol_type = genomic DNA
ttagcgaggaagataaggggtgg

SEQ ID NO: 6945 - DNA, 23 bp, Homo sapiens
  source 1..23: mol_type = genomic DNA
attctcacttaatgttccagtgg

SEQ ID NO: 6946 - DNA, 23 bp, Homo sapiens
  source 1..23: mol_type = genomic DNA
gctactgtgccacctatcagtgg

SEQ ID NO: 6947 - DNA, 23 bp, Homo sapiens
  source 1..23: mol_type = genomic DNA
agtacagaatggattgctggagg

SEQ ID NO: 6948 - DNA, 23 bp, Homo sapiens
  source 1..23: mol_type = genomic DNA
tctgtcgggcataagaatgtcgg

SEQ ID NO: 6949 - DNA, 23 bp, Homo sapiens
  source 1..23: mol_type = genomic DNA
tcttaataaaagttttctcgagg

SEQ ID NO: 6950 - DNA, 23 bp, Homo sapiens
  source 1..23: mol_type = genomic DNA
atcttgggcagtcaacctcaggg

SEQ ID NO: 6951 - DNA, 23 bp, Homo sapiens
  source 1..23: mol_type = genomic DNA
ggactcttgcttgatataggggg

SEQ ID NO: 6952 - DNA, 23 bp, Homo sapiens
  source 1..23: mol_type = genomic DNA
tatggtcaggacattcacttggg

SEQ ID NO: 6953 - DNA, 23 bp, Homo sapiens
  source 1..23: mol_type = genomic DNA
ggcagcatcagattaacctaggg

SEQ ID NO: 6954 - DNA, 23 bp, Homo sapiens
  source 1..23: mol_type = genomic DNA
tcgataagatgattttggagcgg

SEQ ID NO: 6955 - DNA, 23 bp, Homo sapiens
  source 1..23: mol_type = genomic DNA
caatgcttctcattaaaggacgg

SEQ ID NO: 6956 - DNA, 23 bp, Homo sapiens
  source 1..23: mol_type = genomic DNA
acaagccccttaactgtcagtgg

SEQ ID NO: 6957 - DNA, 23 bp, Homo sapiens
  source 1..23: mol_type = genomic DNA
aataaatgttatggacttcgggg

SEQ ID NO: 6958 - DNA, 23 bp, Homo sapiens
  source 1..23: mol_type = genomic DNA
tgatgatagctttagaagcgtgg

SEQ ID NO: 6959 - DNA, 23 bp, Homo sapiens
  source 1..23: mol_type = genomic DNA
tgtatagaagcaataaaaagggg

SEQ ID NO: 6960 - DNA, 23 bp, Homo sapiens
  source 1..23: mol_type = genomic DNA
accatggtcatatagagcagagg

SEQ ID NO: 6961 - DNA, 23 bp, Homo sapiens
  source 1..23: mol_type = genomic DNA
acacagcactcacagaactcagg

SEQ ID NO: 6962 - DNA, 23 bp, Homo sapiens
  source 1..23: mol_type = genomic DNA
ctgcgaagtcctgaattcagagg

SEQ ID NO: 6963 - DNA, 23 bp, Homo sapiens
  source 1..23: mol_type = genomic DNA
gttactcaactagagaaggtagg

SEQ ID NO: 6964 - DNA, 23 bp, Homo sapiens
  source 1..23: mol_type = genomic DNA
agaactactgtatggatccgtgg

SEQ ID NO: 6965 - DNA, 23 bp, Homo sapiens
  source 1..23: mol_type = genomic DNA
aatatagaaatgcatctaagggg

SEQ ID NO: 6966 - DNA, 23 bp, Homo sapiens
  source 1..23: mol_type = genomic DNA
cagatctacacatagatagaggg

SEQ ID NO: 6967 - DNA, 23 bp, Homo sapiens
  source 1..23: mol_type = genomic DNA
tctcccattggggacctacgtgg

SEQ ID NO: 6968 - DNA, 23 bp, Homo sapiens
  source 1..23: mol_type = genomic DNA
cgtattcttaggttttgcggggg

SEQ ID NO: 6969 - DNA, 23 bp, Homo sapiens
  source 1..23: mol_type = genomic DNA
tttctttctacgtttacaagggg

SEQ ID NO: 6970 - DNA, 23 bp, Homo sapiens
  source 1..23: mol_type = genomic DNA
taatgtttataattatggggtgg

SEQ ID NO: 6971 - DNA, 23 bp, Homo sapiens
  source 1..23: mol_type = genomic DNA
attctaaagacagcatctgacgg

SEQ ID NO: 6972 - DNA, 23 bp, Homo sapiens
  source 1..23: mol_type = genomic DNA
gtgcgagtgtatctttctagggg

SEQ ID NO: 6973 - DNA, 23 bp, Homo sapiens
  source 1..23: mol_type = genomic DNA
taatgtgcccgctttgagggagg

SEQ ID NO: 6974 - DNA, 23 bp, Homo sapiens
  source 1..23: mol_type = genomic DNA
aaacacattacctgcccacaggg

SEQ ID NO: 6975 - DNA, 23 bp, Homo sapiens
  source 1..23: mol_type = genomic DNA
aaactagagccagaataagaggg

SEQ ID NO: 6976 - DNA, 23 bp, Homo sapiens
  source 1..23: mol_type = genomic DNA
tgtgatgattacagcagaggcgg

SEQ ID NO: 6977 - DNA, 23 bp, Homo sapiens
  source 1..23: mol_type = genomic DNA
ttacattggccatttttctgggg

SEQ ID NO: 6978 - DNA, 23 bp, Homo sapiens
  source 1..23: mol_type = genomic DNA
tctccatgtattgacaagatggg

SEQ ID NO: 6979 - DNA, 23 bp, Homo sapiens
  source 1..23: mol_type = genomic DNA
ggaggtcctaattacaatggtgg

SEQ ID NO: 6980 - DNA, 23 bp, Homo sapiens
  source 1..23: mol_type = genomic DNA
aagtctgagacttcaagagatgg

SEQ ID NO: 6981 - DNA, 23 bp, Homo sapiens
  source 1..23: mol_type = genomic DNA
ttacagttaataatttcctgagg

SEQ ID NO: 6982 - DNA, 23 bp, Homo sapiens
  source 1..23: mol_type = genomic DNA
ctaaaactatgagtcagcggtgg

SEQ ID NO: 6983 - DNA, 23 bp, Homo sapiens
  source 1..23: mol_type = genomic DNA
ctatatgacagagttggcagagg

SEQ ID NO: 6984 - DNA, 23 bp, Homo sapiens
  source 1..23: mol_type = genomic DNA
aatcatgatagaggatgcatggg

SEQ ID NO: 6985 - DNA, 23 bp, Homo sapiens
  source 1..23: mol_type = genomic DNA
atccacatatgactcaaggtggg

SEQ ID NO: 6986 - DNA, 23 bp, Homo sapiens
  source 1..23: mol_type = genomic DNA
attctcaaactaattaacaatgg

SEQ ID NO: 6987 - DNA, 23 bp, Homo sapiens
  source 1..23: mol_type = genomic DNA
caacagcaacaacaaaagggggg

SEQ ID NO: 6988 - DNA, 23 bp, Homo sapiens
  source 1..23: mol_type = genomic DNA
catgaccatagccaagtgtacgg

SEQ ID NO: 6989 - DNA, 23 bp, Homo sapiens
  source 1..23: mol_type = genomic DNA
taactgacagtgagtgacaaagg

SEQ ID NO: 6990 - DNA, 23 bp, Homo sapiens
  source 1..23: mol_type = genomic DNA
cacgttacattttaacagtgggg

SEQ ID NO: 6991 - DNA, 23 bp, Homo sapiens
  source 1..23: mol_type = genomic DNA
gcgtattcttaggttttgcgggg

SEQ ID NO: 6992 - DNA, 23 bp, Homo sapiens
  source 1..23: mol_type = genomic DNA
attgtatcagaaatatctaacgg

SEQ ID NO: 6993 - DNA, 23 bp, Homo sapiens
  source 1..23: mol_type = genomic DNA
aaattgagcactgcttgaagggg

SEQ ID NO: 6994 - DNA, 23 bp, Homo sapiens
  source 1..23: mol_type = genomic DNA
catgctctaaacaccactaaggg

SEQ ID NO: 6995 - DNA, 23 bp, Homo sapiens
  source 1..23: mol_type = genomic DNA
atcagattatgtggatgcaatgg

SEQ ID NO: 6996 - DNA, 23 bp, Homo sapiens
  source 1..23: mol_type = genomic DNA
ccattgctcaaacctaaggatgg

SEQ ID NO: 6997 - DNA, 23 bp, Homo sapiens
  source 1..23: mol_type = genomic DNA
gtcattgcactacactgccatgg

SEQ ID NO: 6998 - DNA, 23 bp, Homo sapiens
  source 1..23: mol_type = genomic DNA
aaatgtgatgattacagcagagg

SEQ ID NO: 6999 - DNA, 23 bp, Homo sapiens
  source 1..23: mol_type = genomic DNA
attgagcagcgatgtgcacaggg

SEQ ID NO: 7000 - DNA, 23 bp, Homo sapiens
  source 1..23: mol_type = genomic DNA
aaatgtttataagtttacacagg

SEQ ID NO: 7001 - DNA, 23 bp, Homo sapiens
  source 1..23: mol_type = genomic DNA
aaatgtgtatgccctatggatgg

SEQ ID NO: 7002 - DNA, 23 bp, Homo sapiens
  source 1..23: mol_type = genomic DNA
ttccacataatctcagaagtggg

SEQ ID NO: 7003 - DNA, 23 bp, Homo sapiens
  source 1..23: mol_type = genomic DNA
ttacatctagggatacagactgg

SEQ ID NO: 7004 - DNA, 23 bp, Homo sapiens
  source 1..23: mol_type = genomic DNA
atgcagtgacaatatcagaatgg

SEQ ID NO: 7005 - DNA, 23 bp, Homo sapiens
  source 1..23: mol_type = genomic DNA
ttgcaaatctgtctaaacatggg

SEQ ID NO: 7006 - DNA, 23 bp, Homo sapiens
  source 1..23: mol_type = genomic DNA
actatgctaggcacagggcaggg

SEQ ID NO: 7007 - DNA, 23 bp, Homo sapiens
  source 1..23: mol_type = genomic DNA
ggggagaattttattattggggg

SEQ ID NO: 7008 - DNA, 23 bp, Homo sapiens
  source 1..23: mol_type = genomic DNA
atgttagcgaggaagataagggg

SEQ ID NO: 7009 - DNA, 23 bp, Homo sapiens
  source 1..23: mol_type = genomic DNA
aatgcctcttgatcaatctgagg

SEQ ID NO: 7010 - DNA, 23 bp, Homo sapiens
  source 1..23: mol_type = genomic DNA
agtgctctcagactgaggatagg

SEQ ID NO: 7011 - DNA, 23 bp, Homo sapiens
  source 1..23: mol_type = genomic DNA
aggtcagacagaatatggatagg

SEQ ID NO: 7012 - DNA, 23 bp, Homo sapiens
  source 1..23: mol_type = genomic DNA
gcatattacatgaaagtgtgagg

SEQ ID NO: 7013 - DNA, 23 bp, Homo sapiens
  source 1..23: mol_type = genomic DNA
aaatatatagaaactatgctagg

SEQ ID NO: 7014 - DNA, 23 bp, Homo sapiens
  source 1..23: mol_type = genomic DNA
gctaagcgtctgcatacctgggg

SEQ ID NO: 7015 - DNA, 23 bp, Homo sapiens
  source 1..23: mol_type = genomic DNA
caataaagaaacaaaaacctagg

SEQ ID NO: 7016 - DNA, 23 bp, Homo sapiens
  source 1..23: mol_type = genomic DNA
gtatagctctttatcctcagagg

SEQ ID NO: 7017 - DNA, 23 bp, Homo sapiens
  source 1..23: mol_type = genomic DNA
tcagcacaaaacatttatgtggg

SEQ ID NO: 7018 - DNA, 23 bp, Homo sapiens
  source 1..23: mol_type = genomic DNA
tcattgaagtgaatccactctgg

SEQ ID NO: 7019 - DNA, 23 bp, Homo sapiens
  source 1..23: mol_type = genomic DNA
actctcttatattacaatcgtgg

SEQ ID NO: 7020 - DNA, 23 bp, Homo sapiens
  source 1..23: mol_type = genomic DNA
atatatttatatagagcactagg

SEQ ID NO: 7021 - DNA, 23 bp, Homo sapiens
  source 1..23: mol_type = genomic DNA
cccctgtgaataacaaagtgagg

SEQ ID NO: 7022 - DNA, 23 bp, Homo sapiens
  source 1..23: mol_type = genomic DNA
catacagatgaagtaaaagaggg

SEQ ID NO: 7023 - DNA, 23 bp, Homo sapiens
  source 1..23: mol_type = genomic DNA
atagatgaaaagttccctgtggg

SEQ ID NO: 7024 - DNA, 23 bp, Homo sapiens
  source 1..23: mol_type = genomic DNA
aattagaaaaatctttgcagggg

SEQ ID NO: 7025 - DNA, 23 bp, Homo sapiens
  source 1..23: mol_type = genomic DNA
gtcttacagagaaatcataacgg

SEQ ID NO: 7026 - DNA, 23 bp, Homo sapiens
  source 1..23: mol_type = genomic DNA
catggttgattcatggagcgggg

SEQ ID NO: 7027 - DNA, 23 bp, Homo sapiens
  source 1..23: mol_type = genomic DNA
gttggttacaggaggaagcaggg

SEQ ID NO: 7028 - DNA, 23 bp, Homo sapiens
  source 1..23: mol_type = genomic DNA
aacaactcaagagtgatgcaggg

SEQ ID NO: 7029 - DNA, 23 bp, Homo sapiens
  source 1..23: mol_type = genomic DNA
ttcatatagccattgaagagggg

SEQ ID NO: 7030 - DNA, 23 bp, Homo sapiens
  source 1..23: mol_type = genomic DNA
ataggctagaagaagagtagagg

SEQ ID NO: 7031 - DNA, 23 bp, Homo sapiens
  source 1..23: mol_type = genomic DNA
aatccacatatgactcaaggtgg

SEQ ID NO: 7032 - DNA, 23 bp, Homo sapiens
  source 1..23: mol_type = genomic DNA
acagaagtcacaatgatagtggg

SEQ ID NO: 7033 - DNA, 23 bp, Homo sapiens
  source 1..23: mol_type = genomic DNA
atttatttaccatttatccaggg

SEQ ID NO: 7034 - DNA, 23 bp, Homo sapiens
  source 1..23: mol_type = genomic DNA
tgtttcattattctcctaagggg

SEQ ID NO: 7035 - DNA, 23 bp, Homo sapiens
  source 1..23: mol_type = genomic DNA
gtttcaaaatggacttaaggggg

SEQ ID NO: 7036 - DNA, 23 bp, Homo sapiens
  source 1..23: mol_type = genomic DNA
ggaagctactcagtcagcatggg

SEQ ID NO: 7037 - DNA, 23 bp, Homo sapiens
  source 1..23: mol_type = genomic DNA
ttatggctgcaaataagatgagg

SEQ ID NO: 7038 - DNA, 23 bp, Homo sapiens
  source 1..23: mol_type = genomic DNA
tgtactcttgcctcttgaggagg

SEQ ID NO: 7039 - DNA, 23 bp, Homo sapiens
  source 1..23: mol_type = genomic DNA
ttgaggagtatgaaaatgatggg

SEQ ID NO: 7040 - DNA, 23 bp, Homo sapiens
  source 1..23: mol_type = genomic DNA
aatattccctgaaaacagtaggg

SEQ ID NO: 7041 - DNA, 23 bp, Homo sapiens
  source 1..23: mol_type = genomic DNA
tgaatcacaaaaggcacgaaggg

SEQ ID NO: 7042 - DNA, 23 bp, Homo sapiens
  source 1..23: mol_type = genomic DNA
ctcaggaagtcaaaataaagggg

SEQ ID NO: 7043 - DNA, 23 bp, Homo sapiens
  source 1..23: mol_type = genomic DNA
ctaatacaaaccctgtggggagg

SEQ ID NO: 7044 - DNA, 23 bp, Homo sapiens
  source 1..23: mol_type = genomic DNA
tttgtgtgtttatgaggacaggg

SEQ ID NO: 7045 - DNA, 23 bp, Homo sapiens
  source 1..23: mol_type = genomic DNA
ggtcaaccacagtctctgaaagg

SEQ ID NO: 7046 - DNA, 23 bp, Homo sapiens
  source 1..23: mol_type = genomic DNA
agcaaaacgaccacaaatagggg

SEQ ID NO: 7047 - DNA, 23 bp, Homo sapiens
  source 1..23: mol_type = genomic DNA
tcttgtatgtgccgagaaggagg

SEQ ID NO: 7048 - DNA, 23 bp, Homo sapiens
  source 1..23: mol_type = genomic DNA
atcttcagggcagtgatgcgggg

SEQ ID NO: 7049 - DNA, 23 bp, Homo sapiens
  source 1..23: mol_type = genomic DNA
cctgtgtggcttactatgagtgg

SEQ ID NO: 7050 - DNA, 23 bp, Homo sapiens
  source 1..23: mol_type = genomic DNA
ctagatgtaagattctgacctgg

SEQ ID NO: 7051 - DNA, 23 bp, Homo sapiens
  source 1..23: mol_type = genomic DNA
ttatttctcctgcattaatgggg

SEQ ID NO: 7052 - DNA, 23 bp, Homo sapiens
  source 1..23: mol_type = genomic DNA
attccacatggaaatctactggg

SEQ ID NO: 7053 - DNA, 23 bp, Homo sapiens
  source 1..23: mol_type = genomic DNA
agaatcatgactctttgagaggg

SEQ ID NO: 7054 - DNA, 23 bp, Homo sapiens
  source 1..23: mol_type = genomic DNA
gcctaacttcatatgaaacacgg

SEQ ID NO: 7055 - DNA, 23 bp, Homo sapiens
  source 1..23: mol_type = genomic DNA
aatgttaaaaaatttaacatggg

SEQ ID NO: 7056 - DNA, 23 bp, Homo sapiens
  source 1..23: mol_type = genomic DNA
acagagggttaccagtgacttgg

SEQ ID NO: 7057 - DNA, 23 bp, Homo sapiens
  source 1..23: mol_type = genomic DNA
acagtacattctacatgcgttgg

SEQ ID NO: 7058 - DNA, 23 bp, Homo sapiens
  source 1..23: mol_type = genomic DNA
acaaatggtctcctacaactagg

SEQ ID NO: 7059 - DNA, 23 bp, Homo sapiens
  source 1..23: mol_type = genomic DNA
aagtaatgtgatttagtgtgagg

SEQ ID NO: 7060 - DNA, 23 bp, Homo sapiens
  source 1..23: mol_type = genomic DNA
gtcccattacttgaaagaagggg

SEQ ID NO: 7061 - DNA, 23 bp, Homo sapiens
  source 1..23: mol_type = genomic DNA
ctgttaccaaagggaatgggtgg

SEQ ID NO: 7062 - DNA, 23 bp, Homo sapiens
  source 1..23: mol_type = genomic DNA
tctggggcaacattctgcaatgg

SEQ ID NO: 7063 - DNA, 23 bp, Homo sapiens
  source 1..23: mol_type = genomic DNA
gtcctgactagctctcctgcagg

SEQ ID NO: 7064 - DNA, 23 bp, Homo sapiens
  source 1..23: mol_type = genomic DNA
tagcatactgttgttgtgtgcgg

SEQ ID NO: 7065 - DNA, 23 bp, Homo sapiens
  source 1..23: mol_type = genomic DNA
aataatatcaatgcaagcagagg

SEQ ID NO: 7066 - DNA, 23 bp, Homo sapiens
  source 1..23: mol_type = genomic DNA
taagcatttgagaacatcagtgg

SEQ ID NO: 7067 - DNA, 23 bp, Homo sapiens
  source 1..23: mol_type = genomic DNA
gatatacaagaagctgcagaagg

SEQ ID NO: 7068 - DNA, 23 bp, Homo sapiens
  source 1..23: mol_type = genomic DNA
taaacaacaaaaactgtgagagg

SEQ ID NO: 7069 - DNA, 23 bp, Homo sapiens
  source 1..23: mol_type = genomic DNA
aatatgatatttgtgtgtgcggg

SEQ ID NO: 7070 - DNA, 23 bp, Homo sapiens
  source 1..23: mol_type = genomic DNA
tgatggactttacctaaggtggg

SEQ ID NO: 7071 - DNA, 23 bp, Homo sapiens
  source 1..23: mol_type = genomic DNA
agagtcatcagggaaggtggtgg

SEQ ID NO: 7072 - DNA, 23 bp, Homo sapiens
  source 1..23: mol_type = genomic DNA
ttatgaattatggttgcaggagg

SEQ ID NO: 7073 - DNA, 23 bp, Homo sapiens
  source 1..23: mol_type = genomic DNA
tgagagggttaattctcaggagg

SEQ ID NO: 7074 - DNA, 23 bp, Homo sapiens
  source 1..23: mol_type = genomic DNA
cactcatagtaagccacacaggg

SEQ ID NO: 7075 - DNA, 23 bp, Homo sapiens
  source 1..23: mol_type = genomic DNA
taatgagccaatgatcctgatgg

SEQ ID NO: 7076 - DNA, 23 bp, Homo sapiens
  source 1..23: mol_type = genomic DNA
tgtaatgtacagagaactgaagg

SEQ ID NO: 7077 - DNA, 23 bp, Homo sapiens
  source 1..23: mol_type = genomic DNA
aagcaaagcacgaaaaccgcagg

SEQ ID NO: 7078 - DNA, 23 bp, Homo sapiens
  source 1..23: mol_type = genomic DNA
ttattgtatttgtagttgggagg

SEQ ID NO: 7079 - DNA, 23 bp, Homo sapiens
  source 1..23: mol_type = genomic DNA
aatgaatctttcaaaaggagagg

SEQ ID NO: 7080 - DNA, 23 bp, Homo sapiens
  source 1..23: mol_type = genomic DNA
gctagagctaggaagtgaaaggg

SEQ ID NO: 7081 - DNA, 23 bp, Homo sapiens
  source 1..23: mol_type = genomic DNA
agctcatctggacaatcacaagg

SEQ ID NO: 7082 - DNA, 23 bp, Homo sapiens
  source 1..23: mol_type = genomic DNA
gctttatgaaacccacgagtggg

SEQ ID NO: 7083 - DNA, 23 bp, Homo sapiens
  source 1..23: mol_type = genomic DNA
gccaataaaatacataagggagg

SEQ ID NO: 7084 - DNA, 23 bp, Homo sapiens
  source 1..23: mol_type = genomic DNA
attggcctataatacacctcggg

SEQ ID NO: 7085 - DNA, 23 bp, Homo sapiens
  source 1..23: mol_type = genomic DNA
gtggtactttcgactgtccatgg

SEQ ID NO: 7086 - DNA, 23 bp, Homo sapiens
  source 1..23: mol_type = genomic DNA
aatacactcagtattcatgtagg

SEQ ID NO: 7087 - DNA, 23 bp, Homo sapiens
  source 1..23: mol_type = genomic DNA
atctggtgataaacgttcagagg

SEQ ID NO: 7088 - DNA, 23 bp, Homo sapiens
  source 1..23: mol_type = genomic DNA
ctaaagccaagatttgctgaagg

SEQ ID NO: 7089 - DNA, 23 bp, Homo sapiens
  source 1..23: mol_type = genomic DNA
tgacaagaaataatctagagagg

SEQ ID NO: 7090 - DNA, 23 bp, Homo sapiens
  source 1..23: mol_type = genomic DNA
caggtagagctctactagcaggg

SEQ ID NO: 7091 - DNA, 23 bp, Homo sapiens
  source 1..23: mol_type = genomic DNA
ctgagggactactttctgagtgg

SEQ ID NO: 7092 - DNA, 23 bp, Homo sapiens
  source 1..23: mol_type = genomic DNA
tttcaatgcacaaggctgaaagg

SEQ ID NO: 7093 - DNA, 23 bp, Homo sapiens
  source 1..23: mol_type = genomic DNA
gcatattgctgagcagtgaaagg

SEQ ID NO: 7094 - DNA, 23 bp, Homo sapiens
  source 1..23: mol_type = genomic DNA
tagactattttatgttagcgagg

SEQ ID NO: 7095 - DNA, 23 bp, Homo sapiens
  source 1..23: mol_type = genomic DNA
agatttacagacacatagtaggg

SEQ ID NO: 7096 - DNA, 23 bp, Homo sapiens
  source 1..23: mol_type = genomic DNA
tagaagtctaaacaaatgctggg

SEQ ID NO: 7097 - DNA, 23 bp, Homo sapiens
  source 1..23: mol_type = genomic DNA
gcaatcttaactttctatggagg

SEQ ID NO: 7098 - DNA, 23 bp, Homo sapiens
  source 1..23: mol_type = genomic DNA
agaatcatagacatacttcaagg

SEQ ID NO: 7099 - DNA, 23 bp, Homo sapiens
  source 1..23: mol_type = genomic DNA
gtgtaaccaggtcatcatagtgg

SEQ ID NO: 7100 - DNA, 23 bp, Homo sapiens
  source 1..23: mol_type = genomic DNA
tttgtcttatggcaatcgtgtgg

SEQ ID NO: 7101 - DNA, 23 bp, Homo sapiens
  source 1..23: mol_type = genomic DNA
tgagttgctgtgacagtctgtgg

SEQ ID NO: 7102 - DNA, 23 bp, Homo sapiens
  source 1..23: mol_type = genomic DNA
tcttggtcgttgaataacaatgg

SEQ ID NO: 7103 - DNA, 23 bp, Homo sapiens
  source 1..23: mol_type = genomic DNA
gctcaaacctaaggatggtgggg

SEQ ID NO: 7104 - DNA, 23 bp, Homo sapiens
  source 1..23: mol_type = genomic DNA
ccatatagctgctaggacaacgg

SEQ ID NO: 7105 - DNA, 23 bp, Homo sapiens
  source 1..23: mol_type = genomic DNA
aagcactgatcaagaatgagagg

SEQ ID NO: 7106 - DNA, 23 bp, Homo sapiens
  source 1..23: mol_type = genomic DNA
gtttgtaagattattaaggaagg

SEQ ID NO: 7107 - DNA, 23 bp, Homo sapiens
  source 1..23: mol_type = genomic DNA
aactaagagcagcccaacacagg

SEQ ID NO: 7108 - DNA, 23 bp, Homo sapiens
  source 1..23: mol_type = genomic DNA
ttcaggaacatgtattcccaagg

SEQ ID NO: 7109 - DNA, 23 bp, Homo sapiens
  source 1..23: mol_type = genomic DNA
ggaaattattaacagaccagtgg

SEQ ID NO: 7110 - DNA, 23 bp, Homo sapiens
  source 1..23: mol_type = genomic DNA
caagatgaatctcctttggaggg

SEQ ID NO: 7111 - DNA, 23 bp, Homo sapiens
  source 1..23: mol_type = genomic DNA
ctgctcttatatctttccaaggg

SEQ ID NO: 7112 - DNA, 23 bp, Homo sapiens
  source 1..23: mol_type = genomic DNA
tgacagtatggcttgagagaggg

SEQ ID NO: 7113 - DNA, 23 bp, Homo sapiens
  source 1..23: mol_type = genomic DNA
tgttgttatgcatctttcagggg

SEQ ID NO: 7114 - DNA, 23 bp, Homo sapiens
  source 1..23: mol_type = genomic DNA
tgtcaatgcctaactgatgaggg

SEQ ID NO: 7115 - DNA, 23 bp, Homo sapiens
  source 1..23: mol_type = genomic DNA
ttaagctaggaaagaaagtgggg

SEQ ID NO: 7116 - DNA, 23 bp, Homo sapiens
  source 1..23: mol_type = genomic DNA
ttcatcattccactgataggtgg

SEQ ID NO: 7117 - DNA, 23 bp, Homo sapiens
  source 1..23: mol_type = genomic DNA
ttttctttctacgtttacaaggg

SEQ ID NO: 7118 - DNA, 23 bp, Homo sapiens
  source 1..23: mol_type = genomic DNA
tttgcatatctgaatttctgagg

SEQ ID NO: 7119 - DNA, 23 bp, Homo sapiens
  source 1..23: mol_type = genomic DNA
ggtgtgttatctgttaccaaagg

SEQ ID NO: 7120 - DNA, 23 bp, Homo sapiens
  source 1..23: mol_type = genomic DNA
ttaacagctcctcttggtaaggg

SEQ ID NO: 7121 - DNA, 23 bp, Homo sapiens
  source 1..23: mol_type = genomic DNA
cttgaatctttcaaacccccagg

SEQ ID NO: 7122 - DNA, 23 bp, Homo sapiens
  source 1..23: mol_type = genomic DNA
tcaaatagaaagtattacaaagg

SEQ ID NO: 7123 - DNA, 23 bp, Homo sapiens
  source 1..23: mol_type = genomic DNA
ggaatagagctattcatccctgg

SEQ ID NO: 7124 - DNA, 23 bp, Homo sapiens
  source 1..23: mol_type = genomic DNA
ctaaggtacaactgtgtacgggg

SEQ ID NO: 7125 - DNA, 23 bp, Homo sapiens
  source 1..23: mol_type = genomic DNA
ctgttaatggaaagtctggaagg

SEQ ID NO: 7126 - DNA, 23 bp, Homo sapiens
  source 1..23: mol_type = genomic DNA
ataagactaaaagaaaggacagg

SEQ ID NO: 7127 - DNA, 23 bp, Homo sapiens
  source 1..23: mol_type = genomic DNA
accaaatgtacatttggagaggg

SEQ ID NO: 7128 - DNA, 23 bp, Homo sapiens
  source 1..23: mol_type = genomic DNA
catgtttcgaaatagagaagagg

SEQ ID NO: 7129 - DNA, 23 bp, Homo sapiens
  source 1..23: mol_type = genomic DNA
ttaatcctgtagacaaaatgtgg

SEQ ID NO: 7130 - DNA, 23 bp, Homo sapiens
  source 1..23: mol_type = genomic DNA
actcaaacagtttccagcaaggg

SEQ ID NO: 7131 - DNA, 23 bp, Homo sapiens
  source 1..23: mol_type = genomic DNA
ctctaccatactaaaagcagtgg

SEQ ID NO: 7132 - DNA, 23 bp, Homo sapiens
  source 1..23: mol_type = genomic DNA
tctataatattgtagtccatagg

SEQ ID NO: 7133 - DNA, 23 bp, Homo sapiens
  source 1..23: mol_type = genomic DNA
tctgcctaacatttatcatgagg

SEQ ID NO: 7134 - DNA, 23 bp, Homo sapiens
  source 1..23: mol_type = genomic DNA
tgaaataccgtatatagagaagg

SEQ ID NO: 7135 - DNA, 23 bp, Homo sapiens
  source 1..23: mol_type = genomic DNA
ctgtttagcaaaactaaccctgg

SEQ ID NO: 7136 - DNA, 23 bp, Homo sapiens
  source 1..23: mol_type = genomic DNA
ataggatttattccttgcagagg

SEQ ID NO: 7137 - DNA, 23 bp, Homo sapiens
  source 1..23: mol_type = genomic DNA
atgtttcgaaatagagaagaggg

SEQ ID NO: 7138 - DNA, 23 bp, Homo sapiens
  source 1..23: mol_type = genomic DNA
ctgtaatctctacgtctggaagg

SEQ ID NO: 7139 - DNA, 23 bp, Homo sapiens
  source 1..23: mol_type = genomic DNA
atacaagattaatctccttgtgg

SEQ ID NO: 7140 - DNA, 23 bp, Homo sapiens
  source 1..23: mol_type = genomic DNA
atgtgctccatatagctgctagg

SEQ ID NO: 7141 - DNA, 23 bp, Homo sapiens
  source 1..23: mol_type = genomic DNA
ttaataacgataaaaagtaatgg

SEQ ID NO: 7142 - DNA, 23 bp, Homo sapiens
  source 1..23: mol_type = genomic DNA
agtctagtaaatttggtaggggg

SEQ ID NO: 7143 - DNA, 23 bp, Homo sapiens
  source 1..23: mol_type = genomic DNA
agtgatctatatgacagagttgg

SEQ ID NO: 7144 - DNA, 23 bp, Homo sapiens
  source 1..23: mol_type = genomic DNA
atagatagagggacattccaagg

SEQ ID NO: 7145 - DNA, 23 bp, Homo sapiens
  source 1..23: mol_type = genomic DNA
aatcttcccaggcaattctgagg

SEQ ID NO: 7146 - DNA, 23 bp, Homo sapiens
  source 1..23: mol_type = genomic DNA
taatgtcactgtataggccaagg

SEQ ID NO: 7147 - DNA, 23 bp, Homo sapiens
  source 1..23: mol_type = genomic DNA
catgggatatgtgagctacatgg

SEQ ID NO: 7148 - DNA, 23 bp, Homo sapiens
  source 1..23: mol_type = genomic DNA
aaatcacatgaatggtaagaggg

SEQ ID NO: 7149 - DNA, 23 bp, Homo sapiens
  source 1..23: mol_type = genomic DNA
actatacacaccaagtctgtagg

SEQ ID NO: 7150 - DNA, 23 bp, Homo sapiens
  source 1..23: mol_type = genomic DNA
caaatttgaccaaaaaaggaagg

SEQ ID NO: 7151 - DNA, 23 bp, Homo sapiens
  source 1..23: mol_type = genomic DNA
catgctgtactttacaggcatgg

SEQ ID NO: 7152 - DNA, 23 bp, Homo sapiens
  source 1..23: mol_type = genomic DNA
tcataacatcttaaataagaggg

SEQ ID NO: 7153 - DNA, 23 bp, Homo sapiens
  source 1..23: mol_type = genomic DNA
agaaatgtactaggtttcatggg

SEQ ID NO: 7154 - DNA, 23 bp, Homo sapiens
  source 1..23: mol_type = genomic DNA
tcttatcagacatttcaccttgg

SEQ ID NO: 7155 - DNA, 23 bp, Homo sapiens
  source 1..23: mol_type = genomic DNA
aatgtgtgttccatgtcaaatgg

SEQ ID NO: 7156 - DNA, 23 bp, Homo sapiens
  source 1..23: mol_type = genomic DNA
tcatatagccattgaagaggggg

SEQ ID NO: 7157 - DNA, 23 bp, Homo sapiens
  source 1..23: mol_type = genomic DNA
ggaagagtattcggggcagtggg

SEQ ID NO: 7158 - DNA, 23 bp, Homo sapiens
  source 1..23: mol_type = genomic DNA
ctaccatttcaaaattggcatgg

SEQ ID NO: 7159 - DNA, 23 bp, Homo sapiens
  source 1..23: mol_type = genomic DNA
tggtgccgtacacttggctatgg

SEQ ID NO: 7160 - DNA, 23 bp, Homo sapiens
  source 1..23: mol_type = genomic DNA
agaataaacatgcagaggtaggg

SEQ ID NO: 7161 - DNA, 23 bp, Homo sapiens
  source 1..23: mol_type = genomic DNA
tcactgtgttctgctatctgagg

SEQ ID NO: 7162 - DNA, 23 bp, Homo sapiens
  source 1..23: mol_type = genomic DNA
cgaagcatgaaatattcagaagg

SEQ ID NO: 7163 - DNA, 23 bp, Homo sapiens
  source 1..23: mol_type = genomic DNA
ggattactggagtagaggcaagg

SEQ ID NO: 7164 - DNA, 23 bp, Homo sapiens
  source 1..23: mol_type = genomic DNA
attcataatatagtgcaagaagg

SEQ ID NO: 7165 - DNA, 23 bp, Homo sapiens
  source 1..23: mol_type = genomic DNA
agtccgattagccagtcgctggg

SEQ ID NO: 7166 - DNA, 23 bp, Homo sapiens
  source 1..23: mol_type = genomic DNA
gatagttataccaagcccctggg

SEQ ID NO: 7167 - DNA, 23 bp, Homo sapiens
  source 1..23: mol_type = genomic DNA
tttctaggcatccaataatgtgg

SEQ ID NO: 7168 - DNA, 23 bp, Homo sapiens
  source 1..23: mol_type = genomic DNA
tcctgatgaccagaaacccaggg

SEQ ID NO: 7169 - DNA, 23 bp, Homo sapiens
  source 1..23: mol_type = genomic DNA
tcatttctaatttttctctgggg

SEQ ID NO: 7170 - DNA, 23 bp, Homo sapiens
  source 1..23: mol_type = genomic DNA
cacccatctgtgcaaacgtgtgg

SEQ ID NO: 7171 - DNA, 23 bp, Homo sapiens
  source 1..23: mol_type = genomic DNA
cttagtttgcagtataggggagg

SEQ ID NO: 7172 - DNA, 23 bp, Homo sapiens
  source 1..23: mol_type = genomic DNA
gagaattccattcctaacctggg

SEQ ID NO: 7173 - DNA, 23 bp, Homo sapiens
  source 1..23: mol_type = genomic DNA
tatagttactcaactagagaagg

SEQ ID NO: 7174 - DNA, 23 bp, Homo sapiens
  source 1..23: mol_type = genomic DNA
acattcacaagcagcagcaaggg

SEQ ID NO: 7175 - DNA, 23 bp, Homo sapiens
  source 1..23: mol_type = genomic DNA
ataaataaagacatgaggaaagg

SEQ ID NO: 7176 - DNA, 23 bp, Homo sapiens
  source 1..23: mol_type = genomic DNA
ggttcccccaagataagggcagg

SEQ ID NO: 7177 - DNA, 23 bp, Homo sapiens
  source 1..23: mol_type = genomic DNA
ttcaagggatccatgaacactgg

SEQ ID NO: 7178 - DNA, 23 bp, Homo sapiens
  source 1..23: mol_type = genomic DNA
tactcacattgactttcttgggg

SEQ ID NO: 7179 - DNA, 23 bp, Homo sapiens
  source 1..23: mol_type = genomic DNA
aggcagagaatgctcagcagtgg

SEQ ID NO: 7180 - DNA, 23 bp, Homo sapiens
  source 1..23: mol_type = genomic DNA
ggaaagagctatcttaaggatgg

SEQ ID NO: 7181 - DNA, 23 bp, Homo sapiens
  source 1..23: mol_type = genomic DNA
acattaccaagtcctgagaaagg

SEQ ID NO: 7182 - DNA, 23 bp, Homo sapiens
  source 1..23: mol_type = genomic DNA
aatttcttgttgagccggaatgg

SEQ ID NO: 7183 - DNA, 23 bp, Homo sapiens
  source 1..23: mol_type = genomic DNA
actctaaaattagatggcaaagg

SEQ ID NO: 7184 - DNA, 23 bp, Homo sapiens
  source 1..23: mol_type = genomic DNA
ggagagctagtcaggactcaggg

SEQ ID NO: 7185 - DNA, 23 bp, Homo sapiens
  source 1..23: mol_type = genomic DNA
ggactactattaaattaactggg

SEQ ID NO: 7186 - DNA, 23 bp, Homo sapiens
  source 1..23: mol_type = genomic DNA
taatcagcaagcttaatctaggg

SEQ ID NO: 7187 - DNA, 23 bp, Homo sapiens
  source 1..23: mol_type = genomic DNA
gaatttttaataataactaaggg

SEQ ID NO: 7188 - DNA, 23 bp, Homo sapiens
  source 1..23: mol_type = genomic DNA
aattgtcccatgactgtgccagg

SEQ ID NO: 7189 - DNA, 23 bp, Homo sapiens
  source 1..23: mol_type = genomic DNA
tcttcaggtttccctctgcaagg

SEQ ID NO: 7190 - DNA, 23 bp, Homo sapiens
  source 1..23: mol_type = genomic DNA
tttaatggtatgtattaatgcgg

SEQ ID NO: 7191 - DNA, 23 bp, Homo sapiens
  source 1..23: mol_type = genomic DNA
aggagatctttcaatatggatgg

SEQ ID NO: 7192 - DNA, 23 bp, Homo sapiens
  source 1..23: mol_type = genomic DNA
tgtgctttgctctcaaagtgtgg

SEQ ID NO: 7193 - DNA, 23 bp, Homo sapiens
  source 1..23: mol_type = genomic DNA
gttttaattttcccactggtagg

SEQ ID NO: 7194 - DNA, 23 bp, Homo sapiens
  source 1..23: mol_type = genomic DNA
gctgtgatatacttcacattggg

SEQ ID NO: 7195 - DNA, 23 bp, Homo sapiens
  source 1..23: mol_type = genomic DNA
tacacaggttaaaattgagaggg

SEQ ID NO: 7196 - DNA, 23 bp, Homo sapiens
  source 1..23: mol_type = genomic DNA
tctcgctagctataaataccagg

SEQ ID NO: 7197 - DNA, 23 bp, Homo sapiens
  source 1..23: mol_type = genomic DNA
actttaacaaatcagcccctagg

SEQ ID NO: 7198 - DNA, 23 bp, Homo sapiens
  source 1..23: mol_type = genomic DNA
agagtcagcatttattctagagg

SEQ ID NO: 7199 - DNA, 23 bp, Homo sapiens
  source 1..23: mol_type = genomic DNA
tgtttaatggtctttcacaatgg

SEQ ID NO: 7200 - DNA, 23 bp, Homo sapiens
  source 1..23: mol_type = genomic DNA
tttttgttctaaagttaccctgg

SEQ ID NO: 7201 - DNA, 23 bp, Homo sapiens
  source 1..23: mol_type = genomic DNA
taatagagctaagcttctagagg

SEQ ID NO: 7202 - DNA, 23 bp, Homo sapiens
  source 1..23: mol_type = genomic DNA
cagtctagtaaatttggtagggg

SEQ ID NO: 7203 - DNA, 23 bp, Homo sapiens
  source 1..23: mol_type = genomic DNA
gtatgtgccgagaaggaggctgg

SEQ ID NO: 7204 - DNA, 23 bp, Homo sapiens
  source 1..23: mol_type = genomic DNA
tgataggaacataggaaagtcgg

SEQ ID NO: 7205 - DNA, 23 bp, Homo sapiens
  source 1..23: mol_type = genomic DNA
tagtgcagtcatcataaatgagg

SEQ ID NO: 7206 - DNA, 23 bp, Homo sapiens
  source 1..23: mol_type = genomic DNA
cggtctgaaggcaaattcaaagg

SEQ ID NO: 7207 - DNA, 23 bp, Homo sapiens
  source 1..23: mol_type = genomic DNA
ggattaaaaccaaaccctaacgg

SEQ ID NO: 7208 - DNA, 23 bp, Homo sapiens
  source 1..23: mol_type = genomic DNA
aaatacgtttttgtaaagcacgg

SEQ ID NO: 7209 - DNA, 23 bp, Homo sapiens
  source 1..23: mol_type = genomic DNA
ccttcactttccacatgaagggg

SEQ ID NO: 7210 - DNA, 23 bp, Homo sapiens
  source 1..23: mol_type = genomic DNA
agattaacgtgaagaaggctagg

SEQ ID NO: 7211 - DNA, 23 bp, Homo sapiens
  source 1..23: mol_type = genomic DNA
ttactgttttatgaaaggatagg

SEQ ID NO: 7212 - DNA, 23 bp, Homo sapiens
  source 1..23: mol_type = genomic DNA
tgtagaccatatcatggcaatgg

SEQ ID NO: 7213 - DNA, 23 bp, Homo sapiens
  source 1..23: mol_type = genomic DNA
tgctgagtcacagttctcaaggg

SEQ ID NO: 7214 - DNA, 23 bp, Homo sapiens
  source 1..23: mol_type = genomic DNA
acagacctgcccttatcttgggg

SEQ ID NO: 7215 - DNA, 23 bp, Homo sapiens
  source 1..23: mol_type = genomic DNA
ctcaaacctaaggatggtggggg

SEQ ID NO: 7216 - DNA, 23 bp, Homo sapiens
  source 1..23: mol_type = genomic DNA
tactatgagtggcagtgcagagg

SEQ ID NO: 7217 - DNA, 23 bp, Homo sapiens
  source 1..23: mol_type = genomic DNA
ttctgaagcagaaaaatacatgg

SEQ ID NO: 7218 - DNA, 23 bp, Homo sapiens
  source 1..23: mol_type = genomic DNA
aagaaaatcgtggtcccagtggg

SEQ ID NO: 7219 - DNA, 23 bp, Homo sapiens
  source 1..23: mol_type = genomic DNA
aaaatatcaaagacaactaacgg

SEQ ID NO: 7220 - DNA, 23 bp, Homo sapiens
  source 1..23: mol_type = genomic DNA
aagcaagcaagcaattaagaagg

SEQ ID NO: 7221 - DNA, 23 bp, Homo sapiens
  source 1..23: mol_type = genomic DNA
cacacaacaacagtatgctatgg

SEQ ID NO: 7222 - DNA, 23 bp, Homo sapiens
  source 1..23: mol_type = genomic DNA
cctattttctgattatgatgtgg

SEQ ID NO: 7223 - DNA, 23 bp, Homo sapiens
  source 1..23: mol_type = genomic DNA
gactagctgtcacataagactgg

SEQ ID NO: 7224 - DNA, 23 bp, Homo sapiens
  source 1..23: mol_type = genomic DNA
ggggcaataaaaataatgcttgg

SEQ ID NO: 7225 - DNA, 23 bp, Homo sapiens
  source 1..23: mol_type = genomic DNA
cgctgggaaatctaaagaagagg

SEQ ID NO: 7226 - DNA, 23 bp, Homo sapiens
  source 1..23: mol_type = genomic DNA
acaactgacaaaataactgatgg

SEQ ID NO: 7227 - DNA, 23 bp, Homo sapiens
  source 1..23: mol_type = genomic DNA
cttgataagcacatgtacttggg

SEQ ID NO: 7228 - DNA, 23 bp, Homo sapiens
  source 1..23: mol_type = genomic DNA
actcagtaacactctcctgcagg

SEQ ID NO: 7229 - DNA, 23 bp, Homo sapiens
  source 1..23: mol_type = genomic DNA
tcctcactttgttattcacaggg

SEQ ID NO: 7230 - DNA, 23 bp, Homo sapiens
  source 1..23: mol_type = genomic DNA
gcaaatgcacagaagctggtggg

SEQ ID NO: 7231 - DNA, 23 bp, Homo sapiens
  source 1..23: mol_type = genomic DNA
agttaactgagaaagagtagagg

SEQ ID NO: 7232 - DNA, 23 bp, Homo sapiens
  source 1..23: mol_type = genomic DNA
ttgacagtatggcttgagagagg

SEQ ID NO: 7233 - DNA, 23 bp, Homo sapiens
  source 1..23: mol_type = genomic DNA
gtccacacgtttgcacagatggg

SEQ ID NO: 7234 - DNA, 23 bp, Homo sapiens
  source 1..23: mol_type = genomic DNA
tatctgttaccaaagggaatggg

SEQ ID NO: 7235 - DNA, 23 bp, Homo sapiens
  source 1..23: mol_type = genomic DNA
ctcccttagagctaaaaacaggg

SEQ ID NO: 7236 - DNA, 23 bp, Homo sapiens
  source 1..23: mol_type = genomic DNA
attacaacagaagtagtggcagg

SEQ ID NO: 7237 - DNA, 23 bp, Homo sapiens
  source 1..23: mol_type = genomic DNA
ttcgaaatagagaagagggatgg

SEQ ID NO: 7238 - DNA, 23 bp, Homo sapiens
  source 1..23: mol_type = genomic DNA
gactcatcttaattttcacatgg

SEQ ID NO: 7239 - DNA, 23 bp, Homo sapiens
  source 1..23: mol_type = genomic DNA
taaaaatgtctaaatgctagtgg

SEQ ID NO: 7240 - DNA, 23 bp, Homo sapiens
  source 1..23: mol_type = genomic DNA
ctgacattaatagcttggatcgg

SEQ ID NO: 7241 - DNA, 23 bp, Homo sapiens
  source 1..23: mol_type = genomic DNA
attttgaaacaaacttagcaagg

SEQ ID NO: 7242 - DNA, 23 bp, Homo sapiens
  source 1..23: mol_type = genomic DNA
ttatggtcaggacattcacttgg

SEQ ID NO: 7243 - DNA, 23 bp, Homo sapiens
  source 1..23: mol_type = genomic DNA
tttcctaatacaaaccctgtggg

SEQ ID NO: 7244 - DNA, 23 bp, Homo sapiens
  source 1..23: mol_type = genomic DNA
tgttgaaccatatgaagcccagg

SEQ ID NO: 7245 - DNA, 23 bp, Homo sapiens
  source 1..23: mol_type = genomic DNA
ttcctgatgaccagaaacccagg

SEQ ID NO: 7246 - DNA, 23 bp, Homo sapiens
  source 1..23: mol_type = genomic DNA
gagaaagatggaagctaaggagg

SEQ ID NO: 7247 - DNA, 23 bp, Homo sapiens
  source 1..23: mol_type = genomic DNA
tattaactctttaggatacaggg

SEQ ID NO: 7248 - DNA, 23 bp, Homo sapiens
  source 1..23: mol_type = genomic DNA
gaaccaaaactcaggccgtaagg

SEQ ID NO: 7249 - DNA, 23 bp, Homo sapiens
  source 1..23: mol_type = genomic DNA
gaaacaaacttagcaaggagtgg

SEQ ID NO: 7250 - DNA, 23 bp, Homo sapiens
  source 1..23: mol_type = genomic DNA
ataaagggtaaattcaagccagg

SEQ ID NO: 7251 - DNA, 23 bp, Homo sapiens
  source 1..23: mol_type = genomic DNA
gatggtataagggcagtcctggg

SEQ ID NO: 7252 - DNA, 23 bp, Homo sapiens
  source 1..23: mol_type = genomic DNA
aggcagcatcagattaacctagg

SEQ ID NO: 7253 - DNA, 23 bp, Homo sapiens
  source 1..23: mol_type = genomic DNA
ttttagaagagattaccatcagg

SEQ ID NO: 7254 - DNA, 23 bp, Homo sapiens
  source 1..23: mol_type = genomic DNA
acagagagtcattactagatggg

SEQ ID NO: 7255 - DNA, 23 bp, Homo sapiens
  source 1..23: mol_type = genomic DNA
gtaaatacttttcaatgagaggg

SEQ ID NO: 7256 - DNA, 23 bp, Homo sapiens
  source 1..23: mol_type = genomic DNA
gggaaagctttcctaatcaaggg

SEQ ID NO: 7257 - DNA, 23 bp, Homo sapiens
  source 1..23: mol_type = genomic DNA
catctgactttgattccacatgg

SEQ ID NO: 7258 - DNA, 23 bp, Homo sapiens
  source 1..23: mol_type = genomic DNA
tctctaatctgcactagagaagg

SEQ ID NO: 7259 - DNA, 23 bp, Homo sapiens
  source 1..23: mol_type = genomic DNA
tctatctatgtgtagatctgtgg

SEQ ID NO: 7260 - DNA, 23 bp, Homo sapiens
  source 1..23: mol_type = genomic DNA
caaaaaatagaagccaatgtggg

SEQ ID NO: 7261 - DNA, 23 bp, Homo sapiens
  source 1..23: mol_type = genomic DNA
tctaaggtacaactgtgtacggg

SEQ ID NO: 7262 - DNA, 23 bp, Homo sapiens
  source 1..23: mol_type = genomic DNA
ccaacagcaacaacaaaaggggg

SEQ ID NO: 7263 - DNA, 23 bp, Homo sapiens
  source 1..23: mol_type = genomic DNA
ggacagaagagtgtcttcctagg

SEQ ID NO: 7264 - DNA, 23 bp, Homo sapiens
  source 1..23: mol_type = genomic DNA
actgcattatccttgtagacagg

SEQ ID NO: 7265 - DNA, 23 bp, Homo sapiens
  source 1..23: mol_type = genomic DNA
tcacattttctcataggccaagg

SEQ ID NO: 7266 - DNA, 23 bp, Homo sapiens
  source 1..23: mol_type = genomic DNA
ttgccacgtaggtccccaatggg

SEQ ID NO: 7267 - DNA, 23 bp, Homo sapiens
  source 1..23: mol_type = genomic DNA
ttatgtaagacagtgactaaagg

SEQ ID NO: 7268 - DNA, 23 bp, Homo sapiens
  source 1..23: mol_type = genomic DNA
ccccattcatatgtcatgaaggg

SEQ ID NO: 7269 - DNA, 23 bp, Homo sapiens
  source 1..23: mol_type = genomic DNA
tacaatctttgcccactcgtggg

SEQ ID NO: 7270 - DNA, 23 bp, Homo sapiens
  source 1..23: mol_type = genomic DNA
aaggaggaagaggacgaaagagg

SEQ ID NO: 7271 - DNA, 23 bp, Homo sapiens
  source 1..23: mol_type = genomic DNA
gaatctttaatataggtagtggg

SEQ ID NO: 7272 - DNA, 23 bp, Homo sapiens
  source 1..23: mol_type = genomic DNA
aagagatcatacttttactgtgg

SEQ ID NO: 7273 - DNA, 23 bp, Homo sapiens
  source 1..23: mol_type = genomic DNA
taggatttattccttgcagaggg

SEQ ID NO: 7274 - DNA, 23 bp, Homo sapiens
  source 1..23: mol_type = genomic DNA
ggcagagaatgctcagcagtggg

SEQ ID NO: 7275 - DNA, 23 bp, Homo sapiens
  source 1..23: mol_type = genomic DNA
tgaaagctactctgttagatggg

SEQ ID NO: 7276 - DNA, 23 bp, Homo sapiens
  source 1..23: mol_type = genomic DNA
ataaatgaccccattaatgcagg

SEQ ID NO: 7277 - DNA, 23 bp, Homo sapiens
  source 1..23: mol_type = genomic DNA
aattgaatggaggtaaaactagg

SEQ ID NO: 7278 - DNA, 23 bp, Homo sapiens
  source 1..23: mol_type = genomic DNA
acattggctttattttagaacgg

SEQ ID NO: 7279 - DNA, 23 bp, Homo sapiens
  source 1..23: mol_type = genomic DNA
ttagcggtgttgcttttggttgg

SEQ ID NO: 7280 - DNA, 23 bp, Homo sapiens
  source 1..23: mol_type = genomic DNA
cagagtaagtgaaaacaagttgg

SEQ ID NO: 7281 - DNA, 23 bp, Homo sapiens
  source 1..23: mol_type = genomic DNA
tgtacagaaggatacaaggcagg

SEQ ID NO: 7282 - DNA, 23 bp, Homo sapiens
  source 1..23: mol_type = genomic DNA
tatttagcattagaacctcatgg

SEQ ID NO: 7283 - DNA, 23 bp, Homo sapiens
  source 1..23: mol_type = genomic DNA
tggaagctactcagtcagcatgg

SEQ ID NO: 7284 - DNA, 23 bp, Homo sapiens
  source 1..23: mol_type = genomic DNA
gaactttgaaaggttatggaagg

SEQ ID NO: 7285 - DNA, 23 bp, Homo sapiens
  source 1..23: mol_type = genomic DNA
agtaatagtaaatgaggctgggg

SEQ ID NO: 7286 - DNA, 23 bp, Homo sapiens
  source 1..23: mol_type = genomic DNA
tagagcacgagcatttgtgcagg

SEQ ID NO: 7287 - DNA, 23 bp, Homo sapiens
  source 1..23: mol_type = genomic DNA
atgattcattactataagcaggg

SEQ ID NO: 7288 - DNA, 23 bp, Homo sapiens
  source 1..23: mol_type = genomic DNA
ttatcttcagggcagtgatgcgg

SEQ ID NO: 7289 - DNA, 23 bp, Homo sapiens
  source 1..23: mol_type = genomic DNA
actcaagtgctctcagactgagg

SEQ ID NO: 7290 - DNA, 23 bp, Homo sapiens
  source 1..23: mol_type = genomic DNA
atgtggtcaaatcaacccattgg

SEQ ID NO: 7291 - DNA, 23 bp, Homo sapiens
  source 1..23: mol_type = genomic DNA
attctaatcaccccatctgaagg

SEQ ID NO: 7292 - DNA, 23 bp, Homo sapiens
  source 1..23: mol_type = genomic DNA
gttaaaaaatttaacatgggagg

SEQ ID NO: 7293 - DNA, 23 bp, Homo sapiens
  source 1..23: mol_type = genomic DNA
cattgtgtaccaagctcttgagg

SEQ ID NO: 7294 - DNA, 23 bp, Homo sapiens
  source 1..23: mol_type = genomic DNA
aagtccgttagcacaaaagcagg

SEQ ID NO: 7295 - DNA, 23 bp, Homo sapiens
  source 1..23: mol_type = genomic DNA
tttaacttatattttatacctgg

SEQ ID NO: 7296 - DNA, 23 bp, Homo sapiens
  source 1..23: mol_type = genomic DNA
gaaaagagacagccagaagtggg

SEQ ID NO: 7297 - DNA, 23 bp, Homo sapiens
  source 1..23: mol_type = genomic DNA
tatattagttcacttacataggg

SEQ ID NO: 7298 - DNA, 23 bp, Homo sapiens
  source 1..23: mol_type = genomic DNA
atttatggtatctatggaagagg

SEQ ID NO: 7299 - DNA, 23 bp, Homo sapiens
  source 1..23: mol_type = genomic DNA
ggctgaagtcatttaatccatgg

SEQ ID NO: 7300 - DNA, 23 bp, Homo sapiens
  source 1..23: mol_type = genomic DNA
gtccttagtttgcagtatagggg

SEQ ID NO: 7301 - DNA, 23 bp, Homo sapiens
  source 1..23: mol_type = genomic DNA
aggttactcattttattacaggg

SEQ ID NO: 7302 - DNA, 23 bp, Homo sapiens
  source 1..23: mol_type = genomic DNA
gtctttgagtaacatatcccagg

SEQ ID NO: 7303 - DNA, 23 bp, Homo sapiens
  source 1..23: mol_type = genomic DNA
tcacagttgtcatggatacatgg

SEQ ID NO: 7304 - DNA, 23 bp, Homo sapiens
  source 1..23: mol_type = genomic DNA
acattaaatgataggaacatagg

SEQ ID NO: 7305 - DNA, 23 bp, Homo sapiens
  source 1..23: mol_type = genomic DNA
tttcatttacataaaacatgtgg

SEQ ID NO: 7306 - DNA, 23 bp, Homo sapiens
  source 1..23: mol_type = genomic DNA
ccaagcataattacccgtgatgg

SEQ ID NO: 7307 - DNA, 23 bp, Homo sapiens
  source 1..23: mol_type = genomic DNA
agttactgcaactgaatgacagg

SEQ ID NO: 7308 - DNA, 23 bp, Homo sapiens
  source 1..23: mol_type = genomic DNA
aatgtggaagtaacaaagacagg

SEQ ID NO: 7309 - DNA, 23 bp, Homo sapiens
  source 1..23: mol_type = genomic DNA
tgcagtatgctccatccataggg

SEQ ID NO: 7310 - DNA, 23 bp, Homo sapiens
  source 1..23: mol_type = genomic DNA
agagagacaactgtgcagacagg

SEQ ID NO: 7311 - DNA, 23 bp, Homo sapiens
  source 1..23: mol_type = genomic DNA
ggcgttaaaaaaatccccatggg

SEQ ID NO: 7312 - DNA, 23 bp, Homo sapiens
  source 1..23: mol_type = genomic DNA
ataattataagtgatatcacagg

SEQ ID NO: 7313 - DNA, 23 bp, Homo sapiens
  source 1..23: mol_type = genomic DNA
aaggcagtcatggttcctctagg

SEQ ID NO: 7314 - DNA, 23 bp, Homo sapiens
  source 1..23: mol_type = genomic DNA
tatgaccactgacagttaagggg

SEQ ID NO: 7315 - DNA, 23 bp, Homo sapiens
  source 1..23: mol_type = genomic DNA
atggtgggaacaaactccactgg

SEQ ID NO: 7316 - DNA, 23 bp, Homo sapiens
  source 1..23: mol_type = genomic DNA
agtcagagtatcaaaatcactgg

SEQ ID NO: 7317 - DNA, 23 bp, Homo sapiens
  source 1..23: mol_type = genomic DNA
tctatggtatcgggataagatgg

SEQ ID NO: 7318 - DNA, 23 bp, Homo sapiens
  source 1..23: mol_type = genomic DNA
gaagttactgcaatattaggagg

SEQ ID NO: 7319 - DNA, 23 bp, Homo sapiens
  source 1..23: mol_type = genomic DNA
acagcaacaacaaaagggggggg

SEQ ID NO: 7320 - DNA, 23 bp, Homo sapiens
  source 1..23: mol_type = genomic DNA
agttttttagaattcttgctggg

SEQ ID NO: 7321 - DNA, 23 bp, Homo sapiens
  source 1..23: mol_type = genomic DNA
tgtaatagacactttgtggatgg

SEQ ID NO: 7322 - DNA, 23 bp, Homo sapiens
  source 1..23: mol_type = genomic DNA
ttacacaggttaaaattgagagg

SEQ ID NO: 7323 - DNA, 23 bp, Homo sapiens
  source 1..23: mol_type = genomic DNA
tacagttaataatttcctgaggg

SEQ ID NO: 7324 - DNA, 23 bp, Homo sapiens
  source 1..23: mol_type = genomic DNA
gaaggttaggaattttacgttgg

SEQ ID NO: 7325 - DNA, 23 bp, Homo sapiens
  source 1..23: mol_type = genomic DNA
ttaataatagtaaaaaagccagg

SEQ ID NO: 7326 - DNA, 23 bp, Homo sapiens
  source 1..23: mol_type = genomic DNA
gtgattatagaggtgtaagcagg

SEQ ID NO: 7327 - DNA, 23 bp, Homo sapiens
  source 1..23: mol_type = genomic DNA
cttcagcaatgtgatgagtaggg

SEQ ID NO: 7328 - DNA, 23 bp, Homo sapiens
  source 1..23: mol_type = genomic DNA
agactatgcatgaagtactaagg

SEQ ID NO: 7329 - DNA, 23 bp, Homo sapiens
  source 1..23: mol_type = genomic DNA
agttgagtaactatatatgtagg

SEQ ID NO: 7330 - DNA, 23 bp, Homo sapiens
  source 1..23: mol_type = genomic DNA
atttgttaataggtgaccatcgg

SEQ ID NO: 7331 - DNA, 23 bp, Homo sapiens
  source 1..23: mol_type = genomic DNA
agtcagatgccataaatgactgg

SEQ ID NO: 7332 - DNA, 23 bp, Homo sapiens
  source 1..23: mol_type = genomic DNA
tcaggccaagtttctgccaaggg

SEQ ID NO: 7333 - DNA, 23 bp, Homo sapiens
  source 1..23: mol_type = genomic DNA
agccacactaaagttatcaaagg

SEQ ID NO: 7334 - DNA, 23 bp, Homo sapiens
  source 1..23: mol_type = genomic DNA
ctacaggtaataacatgacttgg

SEQ ID NO: 7335 - DNA, 23 bp, Homo sapiens
  source 1..23: mol_type = genomic DNA
aatatgtcatgaattaataacgg

SEQ ID NO: 7336 - DNA, 23 bp, Homo sapiens
  source 1..23: mol_type = genomic DNA
attactaggagattcaaaaacgg

SEQ ID NO: 7337 - DNA, 23 bp, Homo sapiens
  source 1..23: mol_type = genomic DNA
taagttccatttgtattggtagg

SEQ ID NO: 7338 - DNA, 23 bp, Homo sapiens
  source 1..23: mol_type = genomic DNA
ggtccctttatactcctgtaggg

SEQ ID NO: 7339 - DNA, 23 bp, Homo sapiens
  source 1..23: mol_type = genomic DNA
ctttgtcatcaaaaaggcaatgg

SEQ ID NO: 7340 - DNA, 23 bp, Homo sapiens
  source 1..23: mol_type = genomic DNA
gccacactaaagttatcaaaggg

SEQ ID NO: 7341 - DNA, 23 bp, Homo sapiens
  source 1..23: mol_type = genomic DNA
gattttgtttagaaagaacatgg

SEQ ID NO: 7342 - DNA, 23 bp, Homo sapiens
  source 1..23: mol_type = genomic DNA
tatgaaacactcatcagaaacgg

SEQ ID NO: 7343 - DNA, 23 bp, Homo sapiens
  source 1..23: mol_type = genomic DNA
tggggagatcctctgttggatgg

SEQ ID NO: 7344 - DNA, 23 bp, Homo sapiens
  source 1..23: mol_type = genomic DNA
aagaaatccctggataggccagg

SEQ ID NO: 7345 - DNA, 23 bp, Homo sapiens
  source 1..23: mol_type = genomic DNA
acaaagtgctggaagtaaagtgg

SEQ ID NO: 7346 - DNA, 23 bp, Homo sapiens
  source 1..23: mol_type = genomic DNA
gtgtgttatctgttaccaaaggg

SEQ ID NO: 7347 - DNA, 23 bp, Homo sapiens
  source 1..23: mol_type = genomic DNA
aaaactcctaaagtcacagttgg

SEQ ID NO: 7348 - DNA, 23 bp, Homo sapiens
  source 1..23: mol_type = genomic DNA
gtgaagcaataaatagaagaagg

SEQ ID NO: 7349 - DNA, 23 bp, Homo sapiens
  source 1..23: mol_type = genomic DNA
tgctttatttgagcttagagagg

SEQ ID NO: 7350 - DNA, 23 bp, Homo sapiens
  source 1..23: mol_type = genomic DNA
gttccatttcctccccacattgg

SEQ ID NO: 7351 - DNA, 23 bp, Homo sapiens
  source 1..23: mol_type = genomic DNA
gataaactacaaagagtgcctgg

SEQ ID NO: 7352 - DNA, 23 bp, Homo sapiens
  source 1..23: mol_type = genomic DNA
ggaacatgtattcccaaggttgg

SEQ ID NO: 7353 - DNA, 23 bp, Homo sapiens
  source 1..23: mol_type = genomic DNA
tgaacctcatggcggtctgaagg

SEQ ID NO: 7354 - DNA, 23 bp, Homo sapiens
  source 1..23: mol_type = genomic DNA
ggtaagtgtgtgtactatgaggg

SEQ ID NO: 7355 - DNA, 23 bp, Homo sapiens
  source 1..23: mol_type = genomic DNA
aacagcaacaacaaaaggggggg

SEQ ID NO: 7356 - DNA, 23 bp, Homo sapiens
  source 1..23: mol_type = genomic DNA
acacttgcaaaagtataactagg

SEQ ID NO: 7357 - DNA, 23 bp, Homo sapiens
  source 1..23: mol_type = genomic DNA
gtaataggattacatttacctgg

SEQ ID NO: 7358 - DNA, 23 bp, Homo sapiens
  source 1..23: mol_type = genomic DNA
ctaatttttttcagaatgggagg

SEQ ID NO: 7359 - DNA, 23 bp, Homo sapiens
  source 1..23: mol_type = genomic DNA
aagctcttgttactttgagaggg

SEQ ID NO: 7360 - DNA, 23 bp, Homo sapiens
  source 1..23: mol_type = genomic DNA
gcacaatgatttaatggctaggg

SEQ ID NO: 7361 - DNA, 23 bp, Homo sapiens
  source 1..23: mol_type = genomic DNA
actatgagtggcagtgcagaggg

SEQ ID NO: 7362 - DNA, 23 bp, Homo sapiens
  source 1..23: mol_type = genomic DNA
tcatgctctaaacaccactaagg

SEQ ID NO: 7363 - DNA, 23 bp, Homo sapiens
  source 1..23: mol_type = genomic DNA
gtttgcttattcaacacccatgg

SEQ ID NO: 7364 - DNA, 23 bp, Homo sapiens
  source 1..23: mol_type = genomic DNA
cctccaaaagatgagattcgagg

SEQ ID NO: 7365 - DNA, 23 bp, Homo sapiens
  source 1..23: mol_type = genomic DNA
ctactctcctccctcaaagcggg

SEQ ID NO: 7366 - DNA, 23 bp, Homo sapiens
  source 1..23: mol_type = genomic DNA
aacatatcccaggttaggaatgg

SEQ ID NO: 7367 - DNA, 23 bp, Homo sapiens
  source 1..23: mol_type = genomic DNA
tttcatatagccattgaagaggg

SEQ ID NO: 7368 - DNA, 23 bp, Homo sapiens
  source 1..23: mol_type = genomic DNA
ataatatcattattgtactcagg

SEQ ID NO: 7369 - DNA, 23 bp, Homo sapiens
  source 1..23: mol_type = genomic DNA
aaaaatacaggaagaagaagagg

SEQ ID NO: 7370 - DNA, 23 bp, Homo sapiens
  source 1..23: mol_type = genomic DNA
tgatgccaagaacacaactctgg

SEQ ID NO: 7371 - DNA, 23 bp, Homo sapiens
  source 1..23: mol_type = genomic DNA
caaaaactatcccagcgaagagg

SEQ ID NO: 7372 - DNA, 23 bp, Homo sapiens
  source 1..23: mol_type = genomic DNA
gcactgttagtgtagttgtaagg

SEQ ID NO: 7373 - DNA, 23 bp, Homo sapiens
  source 1..23: mol_type = genomic DNA
ttcagggcagtgatgcggggtgg

SEQ ID NO: 7374 - DNA, 23 bp, Homo sapiens
  source 1..23: mol_type = genomic DNA
ctcctattctgtaagttcaaagg

SEQ ID NO: 7375 - DNA, 23 bp, Homo sapiens
  source 1..23: mol_type = genomic DNA
acaatggtattaaatattggtgg

SEQ ID NO: 7376 - DNA, 23 bp, Homo sapiens
  source 1..23: mol_type = genomic DNA
gatttagtgtgaggaaagaaagg

SEQ ID NO: 7377 - DNA, 23 bp, Homo sapiens
  source 1..23: mol_type = genomic DNA
atgtttggattcataagtgttgg

SEQ ID NO: 7378 - DNA, 23 bp, Homo sapiens
  source 1..23: mol_type = genomic DNA
gtttgctgctggttggctggggg

SEQ ID NO: 7379 - DNA, 23 bp, Homo sapiens
  source 1..23: mol_type = genomic DNA
tttaaatataccaaaatccacgg

SEQ ID NO: 7380 - DNA, 23 bp, Homo sapiens
  source 1..23: mol_type = genomic DNA
tcactattttcattctgagacgg

SEQ ID NO: 7381 - DNA, 23 bp, Homo sapiens
  source 1..23: mol_type = genomic DNA
ccatccttaggtttgagcaatgg

SEQ ID NO: 7382 - DNA, 23 bp, Homo sapiens
  source 1..23: mol_type = genomic DNA
tttatagagcatttgtatggggg

SEQ ID NO: 7383 - DNA, 23 bp, Homo sapiens
  source 1..23: mol_type = genomic DNA
taatgtggttgcgtaggcacagg

SEQ ID NO: 7384 - DNA, 23 bp, Homo sapiens
  source 1..23: mol_type = genomic DNA
catttatgatgactgcactaagg

SEQ ID NO: 7385 - DNA, 23 bp, Homo sapiens
  source 1..23: mol_type = genomic DNA
ctgaacataaatcacatgaatgg

SEQ ID NO: 7386 - DNA, 23 bp, Homo sapiens
  source 1..23: mol_type = genomic DNA
tgtaaaacaatttattcccaagg

SEQ ID NO: 7387 - DNA, 23 bp, Homo sapiens
  source 1..23: mol_type = genomic DNA
ggctgtgatatacttcacattgg

SEQ ID NO: 7388 - DNA, 23 bp, Homo sapiens
  source 1..23: mol_type = genomic DNA
atctagagaggagcaatagtagg

SEQ ID NO: 7389 - DNA, 23 bp, Homo sapiens
  source 1..23: mol_type = genomic DNA
tgtgaacaatgatttaaagtagg

SEQ ID NO: 7390 - DNA, 23 bp, Homo sapiens
  source 1..23: mol_type = genomic DNA
cagtattcatgtaggctcccagg

SEQ ID NO: 7391 - DNA, 23 bp, Homo sapiens
  source 1..23: mol_type = genomic DNA
ctgcttatagtaatgaatcatgg

SEQ ID NO: 7392 - DNA, 23 bp, Homo sapiens
  source 1..23: mol_type = genomic DNA
tgaccaaaattggtcacagatgg

SEQ ID NO: 7393 - DNA, 23 bp, Homo sapiens
  source 1..23: mol_type = genomic DNA
tcctacatctagtaaacgttagg

SEQ ID NO: 7394 - DNA, 23 bp, Homo sapiens
  source 1..23: mol_type = genomic DNA
atttcaatagctggaaatgaggg

SEQ ID NO: 7395 - DNA, 23 bp, Homo sapiens
  source 1..23: mol_type = genomic DNA
acattcttcctcacctctatggg

SEQ ID NO: 7396 - DNA, 23 bp, Homo sapiens
  source 1..23: mol_type = genomic DNA
agcaagatttcaaagatagcagg

SEQ ID NO: 7397 - DNA, 23 bp, Homo sapiens
  source 1..23: mol_type = genomic DNA
ggtcatttatatgatatgtcagg

SEQ ID NO: 7398 - DNA, 23 bp, Homo sapiens
  source 1..23: mol_type = genomic DNA
atacctacacaacaactgtaagg

SEQ ID NO: 7399 - DNA, 23 bp, Homo sapiens
  source 1..23: mol_type = genomic DNA
attatgttaacagctcctcttgg

SEQ ID NO: 7400 - DNA, 23 bp, Homo sapiens
  source 1..23: mol_type = genomic DNA
tcacctattaacaaataagatgg

SEQ ID NO: 7401 - DNA, 23 bp, Homo sapiens
  source 1..23: mol_type = genomic DNA
cagttttgatagaataaatgagg

SEQ ID NO: 7402 - DNA, 23 bp, Homo sapiens
  source 1..23: mol_type = genomic DNA
gtatatttatacattccagttgg

SEQ ID NO: 7403 - DNA, 23 bp, Homo sapiens
  source 1..23: mol_type = genomic DNA
tctggtctgaggaatactgctgg

SEQ ID NO: 7404 - DNA, 23 bp, Homo sapiens
  source 1..23: mol_type = genomic DNA
atttcttctacgaaaagtccagg

SEQ ID NO: 7405 - DNA, 23 bp, Homo sapiens
  source 1..23: mol_type = genomic DNA
gcctctttatatcggggaagagg

SEQ ID NO: 7406 - DNA, 23 bp, Homo sapiens
  source 1..23: mol_type = genomic DNA
actccttctgtgccccaatacgg

SEQ ID NO: 7407 - DNA, 23 bp, Homo sapiens
  source 1..23: mol_type = genomic DNA
gtgcccatcttgtcaatacatgg

SEQ ID NO: 7408 - DNA, 23 bp, Homo sapiens
  source 1..23: mol_type = genomic DNA
ggatttcaaaatatgcctgatgg

SEQ ID NO: 7409 - DNA, 23 bp, Homo sapiens
  source 1..23: mol_type = genomic DNA
aggactgcccttataccatcagg

SEQ ID NO: 7410 - DNA, 23 bp, Homo sapiens
  source 1..23: mol_type = genomic DNA
atacaattatcaattaccttggg

SEQ ID NO: 7411 - DNA, 23 bp, Homo sapiens
  source 1..23: mol_type = genomic DNA
atatatgatccttttttctgagg

SEQ ID NO: 7412 - DNA, 23 bp, Homo sapiens
  source 1..23: mol_type = genomic DNA
gattactggagtagaggcaaggg

SEQ ID NO: 7413 - DNA, 23 bp, Homo sapiens
  source 1..23: mol_type = genomic DNA
agttaagaagcagtggtctaggg

SEQ ID NO: 7414 - DNA, 23 bp, Homo sapiens
  source 1..23: mol_type = genomic DNA
acaattatgtgccaattggaagg

SEQ ID NO: 7415 - DNA, 23 bp, Homo sapiens
  source 1..23: mol_type = genomic DNA
gagttgataccatataaattggg

SEQ ID NO: 7416 - DNA, 23 bp, Homo sapiens
  source 1..23: mol_type = genomic DNA
tcagcaatatgcggcacacctgg

SEQ ID NO: 7417 - DNA, 23 bp, Homo sapiens
  source 1..23: mol_type = genomic DNA
aggattttgtgtttaaaaagggg

SEQ ID NO: 7418 - DNA, 23 bp, Homo sapiens
  source 1..23: mol_type = genomic DNA
actgcaatattaggaggctatgg

SEQ ID NO: 7419 - DNA, 23 bp, Homo sapiens
  source 1..23: mol_type = genomic DNA
tgtgtcttactctacattcaggg

SEQ ID NO: 7420 - DNA, 23 bp, Homo sapiens
  source 1..23: mol_type = genomic DNA
atttacacttgagtcaacattgg

SEQ ID NO: 7421 - DNA, 23 bp, Homo sapiens
  source 1..23: mol_type = genomic DNA
agaatgagtgggaaggtcacagg

SEQ ID NO: 7422 - DNA, 23 bp, Homo sapiens
  source 1..23: mol_type = genomic DNA
atatctcaaaccataaatgatgg

SEQ ID NO: 7423 - DNA, 23 bp, Homo sapiens
  source 1..23: mol_type = genomic DNA
tagacattgtgtttcttccaggg

SEQ ID NO: 7424 - DNA, 23 bp, Homo sapiens
  source 1..23: mol_type = genomic DNA
acagaacaagatcagaaacttgg

SEQ ID NO: 7425 - DNA, 23 bp, Homo sapiens
  source 1..23: mol_type = genomic DNA
aatgagcctcaaaaaatactagg

SEQ ID NO: 7426 - DNA, 23 bp, Homo sapiens
  source 1..23: mol_type = genomic DNA
ggaagaaacgagtggaccattgg

SEQ ID NO: 7427 - DNA, 23 bp, Homo sapiens
  source 1..23: mol_type = genomic DNA
ccttcagttacaccaaccttggg

SEQ ID NO: 7428 - DNA, 23 bp, Homo sapiens
  source 1..23: mol_type = genomic DNA
cttgccacgtaggtccccaatgg

SEQ ID NO: 7429 - DNA, 23 bp, Homo sapiens
  source 1..23: mol_type = genomic DNA
gcctcttccccgatataaagagg

SEQ ID NO: 7430 - DNA, 23 bp, Homo sapiens
  source 1..23: mol_type = genomic DNA
ttcgggacttgaatcacaaaagg

SEQ ID NO: 7431 - DNA, 23 bp, Homo sapiens
  source 1..23: mol_type = genomic DNA
gataaggagtcaggctccatagg

SEQ ID NO: 7432 - DNA, 23 bp, Homo sapiens
  source 1..23: mol_type = genomic DNA
ttgtaatgttactcattcatggg

SEQ ID NO: 7433 - DNA, 23 bp, Homo sapiens
  source 1..23: mol_type = genomic DNA
ctcgaatctcatcttttggaggg

SEQ ID NO: 7434 - DNA, 23 bp, Homo sapiens
  source 1..23: mol_type = genomic DNA
gttggcacaaccaaaacctatgg

SEQ ID NO: 7435 - DNA, 23 bp, Homo sapiens
  source 1..23: mol_type = genomic DNA
gaataattcataaatggagatgg

SEQ ID NO: 7436 - DNA, 23 bp, Homo sapiens
  source 1..23: mol_type = genomic DNA
tggataactggtgaaagccttgg

SEQ ID NO: 7437 - DNA, 23 bp, Homo sapiens
  source 1..23: mol_type = genomic DNA
gagttaaaccctgaattgtaggg

SEQ ID NO: 7438 - DNA, 23 bp, Homo sapiens
  source 1..23: mol_type = genomic DNA
ttaataatacatgtaatgcatgg

SEQ ID NO: 7439 - DNA, 23 bp, Homo sapiens
  source 1..23: mol_type = genomic DNA
tatcattattgtactcaggttgg

SEQ ID NO: 7440 - DNA, 23 bp, Homo sapiens
  source 1..23: mol_type = genomic DNA
aagcatgttgaaaagcgtaatgg

SEQ ID NO: 7441 - DNA, 23 bp, Homo sapiens
  source 1..23: mol_type = genomic DNA
aatatgtgtgaagaccagttagg

SEQ ID NO: 7442 - DNA, 23 bp, Homo sapiens
  source 1..23: mol_type = genomic DNA
aaacagagatttttccctaacgg

SEQ ID NO: 7443 - DNA, 23 bp, Homo sapiens
  source 1..23: mol_type = genomic DNA
tggatgatggactttacctaagg

SEQ ID NO: 7444 - DNA, 23 bp, Homo sapiens
  source 1..23: mol_type = genomic DNA
agaatctttgtatcattggatgg

SEQ ID NO: 7445 - DNA, 23 bp, Homo sapiens
  source 1..23: mol_type = genomic DNA
atcagtctagtaaatttggtagg

SEQ ID NO: 7446 - DNA, 23 bp, Homo sapiens
  source 1..23: mol_type = genomic DNA
tgtcaattcaaatggtgcactgg

SEQ ID NO: 7447 - DNA, 23 bp, Homo sapiens
  source 1..23: mol_type = genomic DNA
aggttattgtttacaaccatagg

SEQ ID NO: 7448 - DNA, 23 bp, Homo sapiens
  source 1..23: mol_type = genomic DNA
tcaaactactattatatcaaggg

SEQ ID NO: 7449 - DNA, 23 bp, Homo sapiens
  source 1..23: mol_type = genomic DNA
gcagagtaagaactactgtatgg

SEQ ID NO: 7450 - DNA, 23 bp, Homo sapiens
  source 1..23: mol_type = genomic DNA
tgaaggttacacccagcgactgg

SEQ ID NO: 7451 - DNA, 23 bp, Homo sapiens
  source 1..23: mol_type = genomic DNA
cagtcaaccttctatttccacgg

SEQ ID NO: 7452 - DNA, 23 bp, Homo sapiens
  source 1..23: mol_type = genomic DNA
aagaatcatgactctttgagagg

SEQ ID NO: 7453 - DNA, 23 bp, Homo sapiens
  source 1..23: mol_type = genomic DNA
ctctcaaatacctctccctcagg

SEQ ID NO: 7454 - DNA, 23 bp, Homo sapiens
  source 1..23: mol_type = genomic DNA
aagttatgcttccttcagatggg

SEQ ID NO: 7455 - DNA, 23 bp, Homo sapiens
  source 1..23: mol_type = genomic DNA
acatacagatgaagtaaaagagg

SEQ ID NO: 7456 - DNA, 23 bp, Homo sapiens
  source 1..23: mol_type = genomic DNA
ttaactgtaaaataagatagagg

SEQ ID NO: 7457 - DNA, 23 bp, Homo sapiens
  source 1..23: mol_type = genomic DNA
agctaaaaacaggggtaggaggg

SEQ ID NO: 7458 - DNA, 23 bp, Homo sapiens
  source 1..23: mol_type = genomic DNA
aatcatttttaaatagccccagg

SEQ ID NO: 7459 - DNA, 23 bp, Homo sapiens
  source 1..23: mol_type = genomic DNA
tcaagtaatgggactaagaccgg

SEQ ID NO: 7460 - DNA, 23 bp, Homo sapiens
  source 1..23: mol_type = genomic DNA
gttgctaatatctagtcaaaggg

SEQ ID NO: 7461 - DNA, 23 bp, Homo sapiens
  source 1..23: mol_type = genomic DNA
gcctgacaaactgccctcaatgg

SEQ ID NO: 7462 - DNA, 23 bp, Homo sapiens
  source 1..23: mol_type = genomic DNA
gaatccgtgtcaccattctcagg

SEQ ID NO: 7463 - DNA, 23 bp, Homo sapiens
  source 1..23: mol_type = genomic DNA
aactggactgtttaatgtgatgg

SEQ ID NO: 7464 - DNA, 23 bp, Homo sapiens
  source 1..23: mol_type = genomic DNA
ttattgccatagagaaattgagg

SEQ ID NO: 7465 - DNA, 23 bp, Homo sapiens
  source 1..23: mol_type = genomic DNA
ctattccactgctatgtatgtgg

SEQ ID NO: 7466 - DNA, 23 bp, Homo sapiens
  source 1..23: mol_type = genomic DNA
aatgcgtgatgttcgtccactgg

SEQ ID NO: 7467 - DNA, 23 bp, Homo sapiens
  source 1..23: mol_type = genomic DNA
tgagtactataaagtatttgagg

SEQ ID NO: 7468 - DNA, 23 bp, Homo sapiens
  source 1..23: mol_type = genomic DNA
tgattgtgagccatttccattgg

SEQ ID NO: 7469 - DNA, 23 bp, Homo sapiens
  source 1..23: mol_type = genomic DNA
agtagggcagatatttgccctgg

SEQ ID NO: 7470 - DNA, 23 bp, Homo sapiens
  source 1..23: mol_type = genomic DNA
atttgttcatattaagacatagg

SEQ ID NO: 7471 - DNA, 23 bp, Homo sapiens
  source 1..23: mol_type = genomic DNA
gtgcttcttgaagaaatccctgg

SEQ ID NO: 7472 - DNA, 23 bp, Homo sapiens
  source 1..23: mol_type = genomic DNA
tgtgaagcattgatggagaaagg

SEQ ID NO: 7473 - DNA, 23 bp, Homo sapiens
  source 1..23: mol_type = genomic DNA
gattttatgttagccatcacggg

SEQ ID NO: 7474 - DNA, 23 bp, Homo sapiens
  source 1..23: mol_type = genomic DNA
ttggggccaaaaccgtcaatggg

SEQ ID NO: 7475 - DNA, 23 bp, Homo sapiens
  source 1..23: mol_type = genomic DNA
aattagtgtttgaagatgacagg

SEQ ID NO: 7476 - DNA, 23 bp, Homo sapiens
  source 1..23: mol_type = genomic DNA
gggtaagtgtgtgtactatgagg

SEQ ID NO: 7477 - DNA, 23 bp, Homo sapiens
  source 1..23: mol_type = genomic DNA
gatgctgtctttagaatttgggg

SEQ ID NO: 7478 - DNA, 23 bp, Homo sapiens
  source 1..23: mol_type = genomic DNA
taaggaagtgacttgctgcctgg

SEQ ID NO: 7479 - DNA, 23 bp, Homo sapiens
  source 1..23: mol_type = genomic DNA
gatatgcaacttttactgacagg

SEQ ID NO: 7480 - DNA, 23 bp, Homo sapiens
  source 1..23: mol_type = genomic DNA
gattaagctaggaaagaaagtgg

SEQ ID NO: 7481 - DNA, 23 bp, Homo sapiens
  source 1..23: mol_type = genomic DNA
ttttctagaatttcaagatacgg

SEQ ID NO: 7482 - DNA, 23 bp, Homo sapiens
  source 1..23: mol_type = genomic DNA
ccataaaagccctcttcgctggg

SEQ ID NO: 7483 - DNA, 23 bp, Homo sapiens
  source 1..23: mol_type = genomic DNA
aagtggctatggccaacgtcagg

SEQ ID NO: 7484 - DNA, 23 bp, Homo sapiens
  source 1..23: mol_type = genomic DNA
tcaagttttaattttcccactgg

SEQ ID NO: 7485 - DNA, 23 bp, Homo sapiens
  source 1..23: mol_type = genomic DNA
acacatacatccgcatactaagg

SEQ ID NO: 7486 - DNA, 23 bp, Homo sapiens
  source 1..23: mol_type = genomic DNA
cttttaaaatgagtagcagtagg

SEQ ID NO: 7487 - DNA, 23 bp, Homo sapiens
  source 1..23: mol_type = genomic DNA
ggtgataaacgttcagaggttgg

SEQ ID NO: 7488 - DNA, 23 bp, Homo sapiens
  source 1..23: mol_type = genomic DNA
ctgtgtcacctcaaattctgtgg

SEQ ID NO: 7489 - DNA, 23 bp, Homo sapiens
  source 1..23: mol_type = genomic DNA
agggagtgtttgctgctggttgg

SEQ ID NO: 7490 - DNA, 23 bp, Homo sapiens
  source 1..23: mol_type = genomic DNA
tctctcgacatgcctgttgtggg

SEQ ID NO: 7491 - DNA, 23 bp, Homo sapiens
  source 1..23: mol_type = genomic DNA
gcacgtgtgcacatgcaagctgg

SEQ ID NO: 7492 - DNA, 23 bp, Homo sapiens
  source 1..23: mol_type = genomic DNA
attttcctcttattgacttgagg

SEQ ID NO: 7493 - DNA, 23 bp, Homo sapiens
  source 1..23: mol_type = genomic DNA
gcactgaacaggtcattagttgg

SEQ ID NO: 7494 - DNA, 23 bp, Homo sapiens
  source 1..23: mol_type = genomic DNA
acagtaatgtgcccgctttgagg

SEQ ID NO: 7495 - DNA, 23 bp, Homo sapiens
  source 1..23: mol_type = genomic DNA
ggatctgtgtgagattctgctgg

SEQ ID NO: 7496 - DNA, 23 bp, Homo sapiens
  source 1..23: mol_type = genomic DNA
gagagctgtgaacaattgtaagg

SEQ ID NO: 7497 - DNA, 23 bp, Homo sapiens
  source 1..23: mol_type = genomic DNA
tcttacagagaaatcataacggg

SEQ ID NO: 7498 - DNA, 23 bp, Homo sapiens
  source 1..23: mol_type = genomic DNA
gtttctgccaagggacaggcagg

SEQ ID NO: 7499 - DNA, 23 bp, Homo sapiens
  source 1..23: mol_type = genomic DNA
atatacatgattttccgttaggg

SEQ ID NO: 7500 - DNA, 23 bp, Homo sapiens
  source 1..23: mol_type = genomic DNA
taataactaagggctaataaggg

SEQ ID NO: 7501 - DNA, 23 bp, Homo sapiens
  source 1..23: mol_type = genomic DNA
caagaattagctctgcctgttgg

SEQ ID NO: 7502 - DNA, 23 bp, Homo sapiens
  source 1..23: mol_type = genomic DNA
tttgggttctgtatgtacctagg

SEQ ID NO: 7503 - DNA, 23 bp, Homo sapiens
  source 1..23: mol_type = genomic DNA
ccttcaacaaaactaatcttggg

SEQ ID NO: 7504 - DNA, 23 bp, Homo sapiens
  source 1..23: mol_type = genomic DNA
aaaactctgctttccttccacgg

SEQ ID NO: 7505 - DNA, 23 bp, Homo sapiens
  source 1..23: mol_type = genomic DNA
gtgtaaccttcaaacaccgctgg

SEQ ID NO: 7506 - DNA, 23 bp, Homo sapiens
  source 1..23: mol_type = genomic DNA
caagatgcctcataggtaagagg

SEQ ID NO: 7507 - DNA, 23 bp, Homo sapiens
  source 1..23: mol_type = genomic DNA
atatagtcgaagacttttcaggg

SEQ ID NO: 7508 - DNA, 23 bp, Homo sapiens
  source 1..23: mol_type = genomic DNA
cccagaatacctcaagagcttgg

SEQ ID NO: 7509 - DNA, 23 bp, Homo sapiens
  source 1..23: mol_type = genomic DNA
tcaggtagagctctactagcagg

SEQ ID NO: 7510 - DNA, 23 bp, Homo sapiens
  source 1..23: mol_type = genomic DNA
tatatatgtagaaatgtactagg

SEQ ID NO: 7511 - DNA, 23 bp, Homo sapiens
  source 1..23: mol_type = genomic DNA
ttcctgtttctgctgttagaggg

SEQ ID NO: 7512 - DNA, 23 bp, Homo sapiens
  source 1..23: mol_type = genomic DNA
tttagtttgagcatgtcacttgg

SEQ ID NO: 7513 - DNA, 23 bp, Homo sapiens
  source 1..23: mol_type = genomic DNA
atacaatctttgcccactcgtgg

SEQ ID NO: 7514 - DNA, 23 bp, Homo sapiens
  source 1..23: mol_type = genomic DNA
atgccatctggtttgtccaatgg

SEQ ID NO: 7515 - DNA, 23 bp, Homo sapiens
  source 1..23: mol_type = genomic DNA
tggaaattacttgacatccatgg

SEQ ID NO: 7516 - DNA, 23 bp, Homo sapiens
  source 1..23: mol_type = genomic DNA
tcagactgcctctaaaatagagg

SEQ ID NO: 7517 - DNA, 23 bp, Homo sapiens
  source 1..23: mol_type = genomic DNA
ttagtttgctaggtttgtagtgg

SEQ ID NO: 7518 - DNA, 23 bp, Homo sapiens
  source 1..23: mol_type = genomic DNA
agttggaccaattttttgaaagg

SEQ ID NO: 7519 - DNA, 23 bp, Homo sapiens
  source 1..23: mol_type = genomic DNA
cttgtaaacgtagaaagaaaagg

SEQ ID NO: 7520 - DNA, 23 bp, Homo sapiens
  source 1..23: mol_type = genomic DNA
tcattgcataccatttagctggg

SEQ ID NO: 7521 - DNA, 23 bp, Homo sapiens
  source 1..23: mol_type = genomic DNA
ctttcctcagattgatcaagagg

SEQ ID NO: 7522 - DNA, 23 bp, Homo sapiens
  source 1..23: mol_type = genomic DNA
aaaaagagaataaatctaagagg

SEQ ID NO: 7523 - DNA, 23 bp, Homo sapiens
  source 1..23: mol_type = genomic DNA
ttaggtgatcacagagtgccagg

SEQ ID NO: 7524 - DNA, 23 bp, Homo sapiens
  source 1..23: mol_type = genomic DNA
tctactatataagaaacaattgg

SEQ ID NO: 7525 - DNA, 23 bp, Homo sapiens
  source 1..23: mol_type = genomic DNA
agggaaggtggtggttaaaacgg

SEQ ID NO: 7526 - DNA, 23 bp, Homo sapiens
  source 1..23: mol_type = genomic DNA
tatagattggacaataaggttgg

SEQ ID NO: 7527 - DNA, 23 bp, Homo sapiens
  source 1..23: mol_type = genomic DNA
tcattggctcattatcttcaggg

SEQ ID NO: 7528 - DNA, 23 bp, Homo sapiens
  source 1..23: mol_type = genomic DNA
tagaaattgcatatattccaggg

SEQ ID NO: 7529 - DNA, 23 bp, Homo sapiens
  source 1..23: mol_type = genomic DNA
ttttctgtatagaatcagttggg

SEQ ID NO: 7530 - DNA, 23 bp, Homo sapiens
  source 1..23: mol_type = genomic DNA
ggcttcctgactttaagaaaagg

SEQ ID NO: 7531 - DNA, 23 bp, Homo sapiens
  source 1..23: mol_type = genomic DNA
ctaaaccttactcaaaatagtgg

SEQ ID NO: 7532 - DNA, 23 bp, Homo sapiens
  source 1..23: mol_type = genomic DNA
gtcatatgacatcgtaaaagtgg

SEQ ID NO: 7533 - DNA, 23 bp, Homo sapiens
  source 1..23: mol_type = genomic DNA
gctgaagtagtgattgtccttgg

SEQ ID NO: 7534 - DNA, 23 bp, Homo sapiens
  source 1..23: mol_type = genomic DNA
aagtagacttagagagccatagg

SEQ ID NO: 7535 - DNA, 23 bp, Homo sapiens
  source 1..23: mol_type = genomic DNA
ccaaattagagagcattagcagg

SEQ ID NO: 7536 - DNA, 23 bp, Homo sapiens
  source 1..23: mol_type = genomic DNA
gatgaagattttaagtgccatgg

SEQ ID NO: 7537 - DNA, 23 bp, Homo sapiens
  source 1..23: mol_type = genomic DNA
atagaaactatgctaggcacagg

SEQ ID NO: 7538 - DNA, 23 bp, Homo sapiens
  source 1..23: mol_type = genomic DNA
aatttttttcagaatgggagggg

SEQ ID NO: 7539 - DNA, 23 bp, Homo sapiens
  source 1..23: mol_type = genomic DNA
atgaatcagtgtttgaaaagagg

SEQ ID NO: 7540 - DNA, 23 bp, Homo sapiens
  source 1..23: mol_type = genomic DNA
gtttctatgttcattttcctagg

SEQ ID NO: 7541 - DNA, 23 bp, Homo sapiens
  source 1..23: mol_type = genomic DNA
tagctatgccttctatatgtagg

SEQ ID NO: 7542 - DNA, 23 bp, Homo sapiens
  source 1..23: mol_type = genomic DNA
acatctaaacattttttggaagg

SEQ ID NO: 7543 - DNA, 23 bp, Homo sapiens
  source 1..23: mol_type = genomic DNA
gctaataaagccttcaactgtgg

SEQ ID NO: 7544 - DNA, 23 bp, Homo sapiens
  source 1..23: mol_type = genomic DNA
tttggtgtcctttatcgtcatgg

SEQ ID NO: 7545 - DNA, 23 bp, Homo sapiens
  source 1..23: mol_type = genomic DNA
atcaatagtgagaatttatgtgg

SEQ ID NO: 7546 - DNA, 23 bp, Homo sapiens
  source 1..23: mol_type = genomic DNA
tctttagcatttttaaacaatgg

SEQ ID NO: 7547 - DNA, 23 bp, Homo sapiens
  source 1..23: mol_type = genomic DNA
ggaagagtctatatatagaaagg

SEQ ID NO: 7548 - DNA, 23 bp, Homo sapiens
  source 1..23: mol_type = genomic DNA
atagcaaaggtagtgcttgaagg

SEQ ID NO: 7549 - DNA, 23 bp, Homo sapiens
  source 1..23: mol_type = genomic DNA
tagaaggaaacacctgaaaccgg

SEQ ID NO: 7550 - DNA, 23 bp, Homo sapiens
  source 1..23: mol_type = genomic DNA
attaagctaggaaagaaagtggg

SEQ ID NO: 7551 - DNA, 23 bp, Homo sapiens
  source 1..23: mol_type = genomic DNA
agtagagctgactgaaagcctgg

SEQ ID NO: 7552 - DNA, 23 bp, Homo sapiens
  source 1..23: mol_type = genomic DNA
aagagataagactaaaagaaagg

SEQ ID NO: 7553 - DNA, 23 bp, Homo sapiens
  source 1..23: mol_type = genomic DNA
ttttctcagtggctggatgaggg

SEQ ID NO: 7554 - DNA, 23 bp, Homo sapiens
  source 1..23: mol_type = genomic DNA
gtttccagcaagggttgcccagg

SEQ ID NO: 7555 - DNA, 23 bp, Homo sapiens
  source 1..23: mol_type = genomic DNA
ctttaacaaatcagcccctaggg

SEQ ID NO: 7556 - DNA, 23 bp, Homo sapiens
  source 1..23: mol_type = genomic DNA
ctaaatttacctaaataaaaggg

SEQ ID NO: 7557 - DNA, 23 bp, Homo sapiens
  source 1..23: mol_type = genomic DNA
gcagcattatcaatttatccagg

SEQ ID NO: 7558 - DNA, 23 bp, Homo sapiens
  source 1..23: mol_type = genomic DNA
atccacttgaaataagcaaatgg

SEQ ID NO: 7559 - DNA, 23 bp, Homo sapiens
  source 1..23: mol_type = genomic DNA
caagaagcacagctactgtatgg

SEQ ID NO: 7560 - DNA, 23 bp, Homo sapiens
  source 1..23: mol_type = genomic DNA
cgcacattccctttttcatgagg

SEQ ID NO: 7561 - DNA, 23 bp, Homo sapiens
  source 1..23: mol_type = genomic DNA
taatataactttccattggaggg

SEQ ID NO: 7562 - DNA, 23 bp, Homo sapiens
  source 1..23: mol_type = genomic DNA
agaattgtctgattcacaaaagg

SEQ ID NO: 7563 - DNA, 23 bp, Homo sapiens
  source 1..23: mol_type = genomic DNA
ctaagttgtagaccatatcatgg

SEQ ID NO: 7564 - DNA, 23 bp, Homo sapiens
  source 1..23: mol_type = genomic DNA
ttagttcagtgaggtagaaaggg

SEQ ID NO: 7565 - DNA, 23 bp, Homo sapiens
  source 1..23: mol_type = genomic DNA
cttctaacttttaggccactggg

SEQ ID NO: 7566 - DNA, 23 bp, Homo sapiens
  source 1..23: mol_type = genomic DNA
agaaagaaaaggttaggaaaggg

SEQ ID NO: 7567 - DNA, 23 bp, Homo sapiens
  source 1..23: mol_type = genomic DNA
tgctggacttctaccattgaggg

SEQ ID NO: 7568 - DNA, 23 bp, Homo sapiens
  source 1..23: mol_type = genomic DNA
ataacaaaatttaattctggtgg

SEQ ID NO: 7569 - DNA, 23 bp, Homo sapiens
  source 1..23: mol_type = genomic DNA
aataaaatagtattgagtgatgg

SEQ ID NO: 7570 - DNA, 23 bp, Homo sapiens
  source 1..23: mol_type = genomic DNA
ccaaaggagattcatcttgtggg

SEQ ID NO: 7571 - DNA, 23 bp, Homo sapiens
  source 1..23: mol_type = genomic DNA
acattattcttctcaaggatggg

SEQ ID NO: 7572 - DNA, 23 bp, Homo sapiens
  source 1..23: mol_type = genomic DNA
catcatatcaagttgcccatagg

SEQ ID NO: 7573 - DNA, 23 bp, Homo sapiens
  source 1..23: mol_type = genomic DNA
agatagttataccaagcccctgg

SEQ ID NO: 7574 - DNA, 23 bp, Homo sapiens
  source 1..23: mol_type = genomic DNA
tgattatctttaaatgtgacagg

SEQ ID NO: 7575 - DNA, 23 bp, Homo sapiens
  source 1..23: mol_type = genomic DNA
cgagtgtgcatttatatatgagg

SEQ ID NO: 7576 - DNA, 23 bp, Homo sapiens
  source 1..23: mol_type = genomic DNA
acaaagttatacaacacatatgg

SEQ ID NO: 7577 - DNA, 23 bp, Homo sapiens
  source 1..23: mol_type = genomic DNA
tatcctctacgcttcttacctgg

SEQ ID NO: 7578 - DNA, 23 bp, Homo sapiens
  source 1..23: mol_type = genomic DNA
ctcttttgcagaattttgtaggg

SEQ ID NO: 7579 - DNA, 23 bp, Homo sapiens
  source 1..23: mol_type = genomic DNA
ttataatttctatctcccctagg

SEQ ID NO: 7580 - DNA, 23 bp, Homo sapiens
  source 1..23: mol_type = genomic DNA
taatgtatttttgaaagcatcgg

SEQ ID NO: 7581 - DNA, 23 bp, Homo sapiens
  source 1..23: mol_type = genomic DNA
ctcatccagccactgagaaaagg

SEQ ID NO: 7582 - DNA, 23 bp, Homo sapiens
  source 1..23: mol_type = genomic DNA
attgattctgaaagatatcaagg

SEQ ID NO: 7583 - DNA, 23 bp, Homo sapiens
  source 1..23: mol_type = genomic DNA
tatttcttctgttccaggatggg

SEQ ID NO: 7584 - DNA, 23 bp, Homo sapiens
  source 1..23: mol_type = genomic DNA
ctggatcttatcctataaaaggg

SEQ ID NO: 7585 - DNA, 23 bp, Homo sapiens
  source 1..23: mol_type = genomic DNA
tttaaaatgtgtatgccctatgg

SEQ ID NO: 7586 - DNA, 23 bp, Homo sapiens
  source 1..23: mol_type = genomic DNA
cccttcactttccacatgaaggg

SEQ ID NO: 7587 - DNA, 23 bp, Homo sapiens
  source 1..23: mol_type = genomic DNA
gcccagagcagaaattcaaatgg

SEQ ID NO: 7588 - DNA, 23 bp, Homo sapiens
  source 1..23: mol_type = genomic DNA
aggtattgaaaattgcatatagg

SEQ ID NO: 7589 - DNA, 23 bp, Homo sapiens
  source 1..23: mol_type = genomic DNA
tttacagttttactaaacattgg

SEQ ID NO: 7590 - DNA, 23 bp, Homo sapiens
  source 1..23: mol_type = genomic DNA
actgggatgtgaatgccaatagg

SEQ ID NO: 7591 - DNA, 23 bp, Homo sapiens
  source 1..23: mol_type = genomic DNA
gagaaaacacatcccattgacgg

SEQ ID NO: 7592 - DNA, 23 bp, Homo sapiens
  source 1..23: mol_type = genomic DNA
atagaaatgaatctttcaaaagg

SEQ ID NO: 7593 - DNA, 23 bp, Homo sapiens
  source 1..23: mol_type = genomic DNA
attttggtcaattttttcacagg

SEQ ID NO: 7594 - DNA, 23 bp, Homo sapiens
  source 1..23: mol_type = genomic DNA
tctagtttataaaagtcatcagg

SEQ ID NO: 7595 - DNA, 23 bp, Homo sapiens
  source 1..23: mol_type = genomic DNA
ggaagctataccaagaaaatggg

SEQ ID NO: 7596 - DNA, 23 bp, Homo sapiens
  source 1..23: mol_type = genomic DNA
attctgtagtagttacaagtagg

SEQ ID NO: 7597 - DNA, 23 bp, Homo sapiens
  source 1..23: mol_type = genomic DNA
gctaaatgtgaatgtctagtagg

SEQ ID NO: 7598 - DNA, 23 bp, Homo sapiens
  source 1..23: mol_type = genomic DNA
cctcaagaggcaagagtacatgg

SEQ ID NO: 7599 - DNA, 23 bp, Homo sapiens
  source 1..23: mol_type = genomic DNA
aaacatttggaatcaactgatgg

SEQ ID NO: 7600 - DNA, 23 bp, Homo sapiens
  source 1..23: mol_type = genomic DNA
tataatttctatctcccctaggg

SEQ ID NO: 7601 - DNA, 23 bp, Homo sapiens
  source 1..23: mol_type = genomic DNA
atttgcactcttctaccaaaagg

SEQ ID NO: 7602 - DNA, 23 bp, Homo sapiens
  source 1..23: mol_type = genomic DNA
agatgactattccatgaagctgg

SEQ ID NO: 7603 - DNA, 23 bp, Homo sapiens
  source 1..23: mol_type = genomic DNA
aattacttatttctacctactgg

SEQ ID NO: 7604 - DNA, 23 bp, Homo sapiens
  source 1..23: mol_type = genomic DNA
gttgggattgagtcaagagttgg

SEQ ID NO: 7605 - DNA, 23 bp, Homo sapiens
  source 1..23: mol_type = genomic DNA
atatgcaattttcaataccttgg

SEQ ID NO: 7606 - DNA, 23 bp, Homo sapiens
  source 1..23: mol_type = genomic DNA
ttttcctttataacataatgagg

SEQ ID NO: 7607 - DNA, 23 bp, Homo sapiens
  source 1..23: mol_type = genomic DNA
acacgtttggacattatttgagg

SEQ ID NO: 7608 - DNA, 23 bp, Homo sapiens
  source 1..23: mol_type = genomic DNA
cttgtcacagaattttgccttgg

SEQ ID NO: 7609 - DNA, 23 bp, Homo sapiens
  source 1..23: mol_type = genomic DNA
aatttattatcttggtccatggg

SEQ ID NO: 7610 - DNA, 23 bp, Homo sapiens
  source 1..23: mol_type = genomic DNA
ttgttgtctaagctgaagaaagg

SEQ ID NO: 7611 - DNA, 23 bp, Homo sapiens
  source 1..23: mol_type = genomic DNA
atatttttctgcctttgttgtgg

SEQ ID NO: 7612 - DNA, 23 bp, Homo sapiens
  source 1..23: mol_type = genomic DNA
tgcacaagcatatttttggttgg

SEQ ID NO: 7613 - DNA, 23 bp, Homo sapiens
  source 1..23: mol_type = genomic DNA
tcagactaagaataaaaagtagg

SEQ ID NO: 7614 - DNA, 23 bp, Homo sapiens
  source 1..23: mol_type = genomic DNA
aactgaatttttgtaccagttgg

SEQ ID NO: 7615 - DNA, 23 bp, Homo sapiens
  source 1..23: mol_type = genomic DNA
ctttgtagtttatcaagagcagg

SEQ ID NO: 7616 - DNA, 23 bp, Homo sapiens
  source 1..23: mol_type = genomic DNA
caggagtaaaactttccaacagg

SEQ ID NO: 7617 - DNA, 23 bp, Homo sapiens
  source 1..23: mol_type = genomic DNA
gtatcctaaagagttaatatagg

SEQ ID NO: 7618 - DNA, 23 bp, Homo sapiens
  source 1..23: mol_type = genomic DNA
ttaaaatcatataatattggagg

SEQ ID NO: 7619 - DNA, 23 bp, Homo sapiens
  source 1..23: mol_type = genomic DNA
tgttgtagttgttaatcaaaggg

SEQ ID NO: 7620 - DNA, 23 bp, Homo sapiens
  source 1..23: mol_type = genomic DNA
atattttgaaatgagtcttaggg

SEQ ID NO: 7621 - DNA, 23 bp, Homo sapiens
  source 1..23: mol_type = genomic DNA
cttctcctttggataatgcatgg

SEQ ID NO: 7622 - DNA, 23 bp, Homo sapiens
  source 1..23: mol_type = genomic DNA
tagagaagagggatgggcatagg

SEQ ID NO: 7623 - DNA, 23 bp, Homo sapiens
  source 1..23: mol_type = genomic DNA
acatttttattggctgcaaaagg

SEQ ID NO: 7624 - DNA, 23 bp, Homo sapiens
  source 1..23: mol_type = genomic DNA
gaaaatggttgtgtatcaaaagg

SEQ ID NO: 7625 - DNA, 23 bp, Homo sapiens
  source 1..23: mol_type = genomic DNA
attactccttgaattggctatgg

SEQ ID NO: 7626 - DNA, 23 bp, Homo sapiens
  source 1..23: mol_type = genomic DNA
aagataagaataaatccaacagg

SEQ ID NO: 7627 - DNA, 23 bp, Homo sapiens
  source 1..23: mol_type = genomic DNA
acagatctacacatagatagagg

SEQ ID NO: 7628 - DNA, 23 bp, Homo sapiens
  source 1..23: mol_type = genomic DNA
ataaattctatttattgctaggg

SEQ ID NO: 7629 - DNA, 23 bp, Homo sapiens
  source 1..23: mol_type = genomic DNA
ataattaatataagatagactgg

SEQ ID NO: 7630 - DNA, 23 bp, Homo sapiens
  source 1..23: mol_type = genomic DNA
tgacatttacaaacccgttaggg

SEQ ID NO: 7631 - DNA, 23 bp, Homo sapiens
  source 1..23: mol_type = genomic DNA
ttaagctaagataaattgtatgg

SEQ ID NO: 7632 - DNA, 23 bp, Homo sapiens
  source 1..23: mol_type = genomic DNA
tgacccattattttatcaagtgg

SEQ ID NO: 7633 - DNA, 23 bp, Homo sapiens
  source 1..23: mol_type = genomic DNA
ttctctgtggcaacaaagtaggg

SEQ ID NO: 7634 - DNA, 23 bp, Homo sapiens
  source 1..23: mol_type = genomic DNA
tggaacccttgccctttagcagg

SEQ ID NO: 7635 - DNA, 23 bp, Homo sapiens
  source 1..23: mol_type = genomic DNA
ttttttgtggatatatacatagg

SEQ ID NO: 7636 - DNA, 23 bp, Homo sapiens
  source 1..23: mol_type = genomic DNA
agggatgtctgaaattccttagg

SEQ ID NO: 7637 - DNA, 23 bp, Homo sapiens
  source 1..23: mol_type = genomic DNA
gggtagattgaaacttttgttgg

SEQ ID NO: 7638 - DNA, 23 bp, Homo sapiens
  source 1..23: mol_type = genomic DNA
ttagcaggccatttctcctaagg

SEQ ID NO: 7639 - DNA, 23 bp, Homo sapiens
  source 1..23: mol_type = genomic DNA
cgagcactgataagattagctgg

SEQ ID NO: 7640 - DNA, 23 bp, Homo sapiens
  source 1..23: mol_type = genomic DNA
actacctacagcattgtgatagg

SEQ ID NO: 7641 - DNA, 23 bp, Homo sapiens
  source 1..23: mol_type = genomic DNA
ctatctggtggtcttctcaatgg

SEQ ID NO: 7642 - DNA, 23 bp, Homo sapiens
  source 1..23: mol_type = genomic DNA
ctgtggttcccccaagataaggg

SEQ ID NO: 7643 - DNA, 23 bp, Homo sapiens
  source 1..23: mol_type = genomic DNA
atgttgggtttgatatcaattgg

SEQ ID NO: 7644 - DNA, 23 bp, Homo sapiens
  source 1..23: mol_type = genomic DNA
cattaccttgacctcctgccagg

SEQ ID NO: 7645 - DNA, 23 bp, Homo sapiens
  source 1..23: mol_type = genomic DNA
acgaattgtttctttccctccgg

SEQ ID NO: 7646 - DNA, 23 bp, Homo sapiens
  source 1..23: mol_type = genomic DNA
agcaatttcctcttccctgatgg

SEQ ID NO: 7647 - DNA, 23 bp, Homo sapiens
  source 1..23: mol_type = genomic DNA
tcaatgtacaaactaacttaggg

SEQ ID NO: 7648 - DNA, 23 bp, Homo sapiens
  source 1..23: mol_type = genomic DNA
gttgcatccgtggaaatagaagg

SEQ ID NO: 7649 - DNA, 23 bp, Homo sapiens
  source 1..23: mol_type = genomic DNA
aaatatgcctgatggtataaggg

SEQ ID NO: 7650 - DNA, 23 bp, Homo sapiens
  source 1..23: mol_type = genomic DNA
tgacaggacataatgaactttgg

SEQ ID NO: 7651 - DNA, 23 bp, Homo sapiens
  source 1..23: mol_type = genomic DNA
tagacacttgaaatatagattgg

SEQ ID NO: 7652 - DNA, 23 bp, Homo sapiens
  source 1..23: mol_type = genomic DNA
ttacactgaaagttgctagaagg

SEQ ID NO: 7653 - DNA, 23 bp, Homo sapiens
  source 1..23: mol_type = genomic DNA
cttgaattgaatcagagaaatgg

SEQ ID NO: 7654 - DNA, 23 bp, Homo sapiens
  source 1..23: mol_type = genomic DNA
cagctaccacccattccctttgg

SEQ ID NO: 7655 - DNA, 23 bp, Homo sapiens
  source 1..23: mol_type = genomic DNA
agaaatctacttagtttgctagg

SEQ ID NO: 7656 - DNA, 23 bp, Homo sapiens
  source 1..23: mol_type = genomic DNA
atttgctctgaggcactctcagg

SEQ ID NO: 7657 - DNA, 23 bp, Homo sapiens
  source 1..23: mol_type = genomic DNA
tgtccagatgagctttagcttgg

SEQ ID NO: 7658 - DNA, 23 bp, Homo sapiens
  source 1..23: mol_type = genomic DNA
gcaaaggtaaaaataattgtagg

SEQ ID NO: 7659 - DNA, 23 bp, Homo sapiens
  source 1..23: mol_type = genomic DNA
tttaaaaacctcatgaaaaaggg

SEQ ID NO: 7660 - DNA, 23 bp, Homo sapiens
  source 1..23: mol_type = genomic DNA
atcatcatatttgtgttacatgg

SEQ ID NO: 7661 - DNA, 23 bp, Homo sapiens
  source 1..23: mol_type = genomic DNA
tcaggtttacttgcaaggaatgg

SEQ ID NO: 7662 - DNA, 23 bp, Homo sapiens
  source 1..23: mol_type = genomic DNA
atttttgtgggtacatactaggg

SEQ ID NO: 7663 - DNA, 23 bp, Homo sapiens
  source 1..23: mol_type = genomic DNA
ataccagaattagagtatatcgg

SEQ ID NO: 7664 - DNA, 23 bp, Homo sapiens
  source 1..23: mol_type = genomic DNA
accagaaagagtacaaataaggg

SEQ ID NO: 7665 - DNA, 23 bp, Homo sapiens
  source 1..23: mol_type = genomic DNA
agagtgtcttcctaggcaatagg

SEQ ID NO: 7666 - DNA, 23 bp, Homo sapiens
  source 1..23: mol_type = genomic DNA
gcaaaagcctatagacatacagg

SEQ ID NO: 7667 - DNA, 23 bp, Homo sapiens
  source 1..23: mol_type = genomic DNA
tctaacctaaatgtatttgaggg

SEQ ID NO: 7668 - DNA, 23 bp, Homo sapiens
  source 1..23: mol_type = genomic DNA
tccaattctgttctgcagacggg

SEQ ID NO: 7669 - DNA, 23 bp, Homo sapiens
  source 1..23: mol_type = genomic DNA
ttgaaatgagtcttagggctagg

SEQ ID NO: 7670 - DNA, 23 bp, Homo sapiens
  source 1..23: mol_type = genomic DNA
ttaatataagatagactggttgg

SEQ ID NO: 7671 - DNA, 23 bp, Homo sapiens
  source 1..23: mol_type = genomic DNA
ttaacaagttatatgattcaggg

SEQ ID NO: 7672 - DNA, 23 bp, Homo sapiens
  source 1..23: mol_type = genomic DNA
aattacctcaagtcaataagagg

SEQ ID NO: 7673 - DNA, 23 bp, Homo sapiens
  source 1..23: mol_type = genomic DNA
tatgttagcgaggaagataaggg

SEQ ID NO: 7674 - DNA, 23 bp, Homo sapiens
  source 1..23: mol_type = genomic DNA
tctctgagtttcaaacagattgg

SEQ ID NO: 7675 - DNA, 23 bp, Homo sapiens
  source 1..23: mol_type = genomic DNA
tcatatataactcaatataccgg

SEQ ID NO: 7676 - DNA, 23 bp, Homo sapiens
  source 1..23: mol_type = genomic DNA
ttgccatgccaattttgaaatgg

SEQ ID NO: 7677 - DNA, 23 bp, Homo sapiens
  source 1..23: mol_type = genomic DNA
gctctatatgaccatggtccagg

SEQ ID NO: 7678 - DNA, 23 bp, Homo sapiens
  source 1..23: mol_type = genomic DNA
gttaatataggatgtaatatagg

SEQ ID NO: 7679 - DNA, 23 bp, Homo sapiens
  source 1..23: mol_type = genomic DNA
gtctgtacctacccagatatagg

SEQ ID NO: 7680 - DNA, 23 bp, Homo sapiens
  source 1..23: mol_type = genomic DNA
gattagtaagaacctttctcagg

SEQ ID NO: 7681 - DNA, 23 bp, Homo sapiens
  source 1..23: mol_type = genomic DNA
gtagcaaatgaatcttttgaagg

SEQ ID NO: 7682 - DNA, 23 bp, Homo sapiens
  source 1..23: mol_type = genomic DNA
tggctgttaaaaagtcataaagg

SEQ ID NO: 7683 - DNA, 23 bp, Homo sapiens
  source 1..23: mol_type = genomic DNA
gtatttttatctttttgacttgg

SEQ ID NO: 7684 - DNA, 23 bp, Homo sapiens
  source 1..23: mol_type = genomic DNA
gagtttcttaacaaatacttagg

SEQ ID NO: 7685 - DNA, 23 bp, Homo sapiens
  source 1..23: mol_type = genomic DNA
aatgaacctttattcccaaaagg

SEQ ID NO: 7686 - DNA, 23 bp, Homo sapiens
  source 1..23: mol_type = genomic DNA
aggagaaatggcctgctaaaggg

SEQ ID NO: 7687 - DNA, 23 bp, Homo sapiens
  source 1..23: mol_type = genomic DNA
gagatttacagacacatagtagg

SEQ ID NO: 7688 - DNA, 23 bp, Homo sapiens
  source 1..23: mol_type = genomic DNA
agaaaattttgtaatgaggtggg

SEQ ID NO: 7689 - DNA, 23 bp, Homo sapiens
  source 1..23: mol_type = genomic DNA
agcaaatcttggctttagccagg

SEQ ID NO: 7690 - DNA, 23 bp, Homo sapiens
  source 1..23: mol_type = genomic DNA
ctagagctcaagtgaaatatggg

SEQ ID NO: 7691 - DNA, 23 bp, Homo sapiens
  source 1..23: mol_type = genomic DNA
gtaaagactctaatatataaggg

SEQ ID NO: 7692 - DNA, 23 bp, Homo sapiens
  source 1..23: mol_type = genomic DNA
cactaacttgacataacaaatgg

SEQ ID NO: 7693 - DNA, 23 bp, Homo sapiens
  source 1..23: mol_type = genomic DNA
cccttcaaagcctttccttacgg

SEQ ID NO: 7694 - DNA, 23 bp, Homo sapiens
  source 1..23: mol_type = genomic DNA
taaaaaatatggaatattaaggg

SEQ ID NO: 7695 - DNA, 23 bp, Homo sapiens
  source 1..23: mol_type = genomic DNA
ccttttgatctagctatcctggg

SEQ ID NO: 7696 - DNA, 23 bp, Homo sapiens
  source 1..23: mol_type = genomic DNA
acttttgcttatgttagctcagg

SEQ ID NO: 7697 - DNA, 23 bp, Homo sapiens
  source 1..23: mol_type = genomic DNA
ttaccatttcaaattatgaatgg

SEQ ID NO: 7698 - DNA, 23 bp, Homo sapiens
  source 1..23: mol_type = genomic DNA
gcgtctgttttttcatccaatgg

SEQ ID NO: 7699 - DNA, 23 bp, Homo sapiens
  source 1..23: mol_type = genomic DNA
gtgtatagaagcaataaaaaggg

SEQ ID NO: 7700 - DNA, 23 bp, Homo sapiens
  source 1..23: mol_type = genomic DNA
ttaactgtcagtggtcataaagg

SEQ ID NO: 7701 - DNA, 23 bp, Homo sapiens
  source 1..23: mol_type = genomic DNA
ataactttgactcttatctctgg

SEQ ID NO: 7702 - DNA, 23 bp, Homo sapiens
  source 1..23: mol_type = genomic DNA
gtccagatgagctttagcttggg

SEQ ID NO: 7703 - DNA, 23 bp, Homo sapiens
  source 1..23: mol_type = genomic DNA
ggaatctttaatataggtagtgg

SEQ ID NO: 7704 - DNA, 23 bp, Homo sapiens
  source 1..23: mol_type = genomic DNA
gctcaactttttttttgtatggg

SEQ ID NO: 7705 - DNA, 23 bp, Homo sapiens
  source 1..23: mol_type = genomic DNA
gttaactgagaaagagtagaggg

SEQ ID NO: 7706 - DNA, 23 bp, Homo sapiens
  source 1..23: mol_type = genomic DNA
cttcagtgagaacttcctgttgg

SEQ ID NO: 7707 - DNA, 23 bp, Homo sapiens
  source 1..23: mol_type = genomic DNA
catgtctctagagatagaatagg

SEQ ID NO: 7708 - DNA, 23 bp, Homo sapiens
  source 1..23: mol_type = genomic DNA
gtgcagacatggttgattcatgg

SEQ ID NO: 7709 - DNA, 23 bp, Homo sapiens
  source 1..23: mol_type = genomic DNA
caattcttgccattgtgttaggg

SEQ ID NO: 7710 - DNA, 23 bp, Homo sapiens
  source 1..23: mol_type = genomic DNA
aaatgaataaaacaataaaacgg

SEQ ID NO: 7711 - DNA, 23 bp, Homo sapiens
  source 1..23: mol_type = genomic DNA
ggagacataagtatgtgaaatgg

SEQ ID NO: 7712 - DNA, 23 bp, Homo sapiens
  source 1..23: mol_type = genomic DNA
tgctaagcgtctgcatacctggg

SEQ ID NO: 7713 - DNA, 23 bp, Homo sapiens
  source 1..23: mol_type = genomic DNA
agagcatacaccccaataatggg

SEQ ID NO: 7714 - DNA, 23 bp, Homo sapiens
  source 1..23: mol_type = genomic DNA
atagaggtagacgttttaaaggg

SEQ ID NO: 7715 - DNA, 23 bp, Homo sapiens
  source 1..23: mol_type = genomic DNA
ctgatcttggattgaccagatgg

SEQ ID NO: 7716 - DNA, 23 bp, Homo sapiens
  source 1..23: mol_type = genomic DNA
aacctcaacttaaacccaaatgg

SEQ ID NO: 7717 - DNA, 23 bp, Homo sapiens
  source 1..23: mol_type = genomic DNA
tttgcgcaacaattttcaaatgg

SEQ ID NO: 7718 - DNA, 23 bp, Homo sapiens
  source 1..23: mol_type = genomic DNA
attcaaagcctacatatagaagg

SEQ ID NO: 7719 - DNA, 23 bp, Homo sapiens
  source 1..23: mol_type = genomic DNA
tgtataacacagcagtgaatagg

SEQ ID NO: 7720 - DNA, 23 bp, Homo sapiens
  source 1..23: mol_type = genomic DNA
tattaacatgtcaattcaaatgg

SEQ ID NO: 7721 - DNA, 23 bp, Homo sapiens
  source 1..23: mol_type = genomic DNA
acacccagcgactggctaatcgg

SEQ ID NO: 7722 - DNA, 23 bp, Homo sapiens
  source 1..23: mol_type = genomic DNA
aagctgatagttcctaactatgg

SEQ ID NO: 7723 - DNA, 23 bp, Homo sapiens
  source 1..23: mol_type = genomic DNA
gtgataggccagcagtactatgg

SEQ ID NO: 7724 - DNA, 23 bp, Homo sapiens
  source 1..23: mol_type = genomic DNA
gcctgaggtttagttttaagtgg

SEQ ID NO: 7725 - DNA, 23 bp, Homo sapiens
  source 1..23: mol_type = genomic DNA
agtgaaaactaagatgaaactgg

SEQ ID NO: 7726 - DNA, 23 bp, Homo sapiens
  source 1..23: mol_type = genomic DNA
accaacagcaacaacaaaagggg

SEQ ID NO: 7727 - DNA, 23 bp, Homo sapiens
  source 1..23: mol_type = genomic DNA
ttatgaccactgacagttaaggg

SEQ ID NO: 7728 - DNA, 23 bp, Homo sapiens
  source 1..23: mol_type = genomic DNA
aggaagtcaccaccaataacagg

SEQ ID NO: 7729 - DNA, 23 bp, Homo sapiens
  source 1..23: mol_type = genomic DNA
agttctatcttcttctgtaccgg

SEQ ID NO: 7730 - DNA, 23 bp, Homo sapiens
  source 1..23: mol_type = genomic DNA
ctagaagtctaaacaaatgctgg

SEQ ID NO: 7731 - DNA, 23 bp, Homo sapiens
  source 1..23: mol_type = genomic DNA
ttacatgtctgttttgtttgtgg

SEQ ID NO: 7732 - DNA, 23 bp, Homo sapiens
  source 1..23: mol_type = genomic DNA
ataagttgagatatactttgagg

SEQ ID NO: 7733 - DNA, 23 bp, Homo sapiens
  source 1..23: mol_type = genomic DNA
aggcagaagacagcttttaaggg

SEQ ID NO: 7734 - DNA, 23 bp, Homo sapiens
  source 1..23: mol_type = genomic DNA
aacagaaccttttctcccattgg

SEQ ID NO: 7735 - DNA, 23 bp, Homo sapiens
  source 1..23: mol_type = genomic DNA
gtttaaactttgcaatactaagg

SEQ ID NO: 7736 - DNA, 23 bp, Homo sapiens
  source 1..23: mol_type = genomic DNA
cattaaataattaaagtagaagg

SEQ ID NO: 7737 - DNA, 23 bp, Homo sapiens
  source 1..23: mol_type = genomic DNA
ttaaggaaagagctatcttaagg

SEQ ID NO: 7738 - DNA, 23 bp, Homo sapiens
  source 1..23: mol_type = genomic DNA
tttcaattcatcagattatgtgg

SEQ ID NO: 7739 - DNA, 23 bp, Homo sapiens
  source 1..23: mol_type = genomic DNA
ttattacatagtcagtactatgg

SEQ ID NO: 7740 - DNA, 23 bp, Homo sapiens
  source 1..23: mol_type = genomic DNA
gaaagatgcataacaacaattgg

SEQ ID NO: 7741 - DNA, 23 bp, Homo sapiens
  source 1..23: mol_type = genomic DNA
cactaccttctattaaaaagagg

SEQ ID NO: 7742 - DNA, 23 bp, Homo sapiens
  source 1..23: mol_type = genomic DNA
ttaaagatagattgggggggtgg

SEQ ID NO: 7743 - DNA, 23 bp, Homo sapiens
  source 1..23: mol_type = genomic DNA
tcacctctatgggtactaactgg

SEQ ID NO: 7744 - DNA, 23 bp, Homo sapiens
  source 1..23: mol_type = genomic DNA
acaggaatatttgctctttgagg

SEQ ID NO: 7745 - DNA, 23 bp, Homo sapiens
  source 1..23: mol_type = genomic DNA
tgtgcgagtgtatctttctaggg

SEQ ID NO: 7746 - DNA, 23 bp, Homo sapiens
  source 1..23: mol_type = genomic DNA
aatctaagaacatttcagattgg

SEQ ID NO: 7747 - DNA, 23 bp, Homo sapiens
  source 1..23: mol_type = genomic DNA
gaactcatctgtgtgtttagagg

SEQ ID NO: 7748 - DNA, 23 bp, Homo sapiens
  source 1..23: mol_type = genomic DNA
ccgttgtcctagcagctatatgg

SEQ ID NO: 7749 - DNA, 23 bp, Homo sapiens
  source 1..23: mol_type = genomic DNA
atattgcatgcgctaatcatagg

SEQ ID NO: 7750 - DNA, 23 bp, Homo sapiens
  source 1..23: mol_type = genomic DNA
ttacatgtctaaataccaattgg

SEQ ID NO: 7751 - DNA, 23 bp, Homo sapiens
  source 1..23: mol_type = genomic DNA
gatatggatatacttatagatgg

SEQ ID NO: 7752 - DNA, 23 bp, Homo sapiens
  source 1..23: mol_type = genomic DNA
gattaaaaccaaaccctaacggg

SEQ ID NO: 7753 - DNA, 23 bp, Homo sapiens
  source 1..23: mol_type = genomic DNA
acatcagtggtttagttttgagg

SEQ ID NO: 7754 - DNA, 23 bp, Homo sapiens
  source 1..23: mol_type = genomic DNA
tggtcctgttctctgggtaatgg

SEQ ID NO: 7755 - DNA, 23 bp, Homo sapiens
  source 1..23: mol_type = genomic DNA
actttgtcatcatcactcatagg

SEQ ID NO: 7756 - DNA, 23 bp, Homo sapiens
  source 1..23: mol_type = genomic DNA
cttggggccaaaaccgtcaatgg

SEQ ID NO: 7757 - DNA, 23 bp, Homo sapiens
  source 1..23: mol_type = genomic DNA
aagcaatacacactacatatcgg

SEQ ID NO: 7758 - DNA, 23 bp, Homo sapiens
  source 1..23: mol_type = genomic DNA
ggacaatcacaagggtttagagg

SEQ ID NO: 7759 - DNA, 23 bp, Homo sapiens
  source 1..23: mol_type = genomic DNA
catcagtgttgtatgccatctgg

SEQ ID NO: 7760 - DNA, 23 bp, Homo sapiens
  source 1..23: mol_type = genomic DNA
tgccgtgtgccctaatcaacagg

SEQ ID NO: 7761 - DNA, 23 bp, Homo sapiens
  source 1..23: mol_type = genomic DNA
actatcatgaaccagccttcagg

SEQ ID NO: 7762 - DNA, 23 bp, Homo sapiens
  source 1..23: mol_type = genomic DNA
gtcattctgcagtccatcatagg

SEQ ID NO: 7763 - DNA, 23 bp, Homo sapiens
  source 1..23: mol_type = genomic DNA
gcagtaaaatcaataataaaggg

SEQ ID NO: 7764 - DNA, 23 bp, Homo sapiens
  source 1..23: mol_type = genomic DNA
gatttcatcaattccaaaacagg

SEQ ID NO: 7765 - DNA, 23 bp, Homo sapiens
  source 1..23: mol_type = genomic DNA
ccaattcaaggagtaatagaagg

SEQ ID NO: 7766 - DNA, 23 bp, Homo sapiens
  source 1..23: mol_type = genomic DNA
tagcacataactttgtatatagg

SEQ ID NO: 7767 - DNA, 23 bp, Homo sapiens
  source 1..23: mol_type = genomic DNA
gcatgaatcacgaattttgctgg

SEQ ID NO: 7768 - DNA, 23 bp, Homo sapiens
  source 1..23: mol_type = genomic DNA
tttccctacaggagtataaaggg

SEQ ID NO: 7769 - DNA, 23 bp, Homo sapiens
  source 1..23: mol_type = genomic DNA
gtatttcacatgcagtttgttgg

SEQ ID NO: 7770 - DNA, 23 bp, Homo sapiens
  source 1..23: mol_type = genomic DNA
aattacaattatgtgccaattgg

SEQ ID NO: 7771 - DNA, 23 bp, Homo sapiens
  source 1..23: mol_type = genomic DNA
ttccattcctgcctgtcccttgg

SEQ ID NO: 7772 - DNA, 23 bp, Homo sapiens
  source 1..23: mol_type = genomic DNA
cctcgaatctcatcttttggagg

SEQ ID NO: 7773 - DNA, 23 bp, Homo sapiens
  source 1..23: mol_type = genomic DNA
ttttggttgtgccaacatatagg

SEQ ID NO: 7774 - DNA, 23 bp, Homo sapiens
  source 1..23: mol_type = genomic DNA
catacgcaacatcagaataaggg

SEQ ID NO: 7775 - DNA, 23 bp, Homo sapiens
  source 1..23: mol_type = genomic DNA
ataactgcacaccaagcatttgg

SEQ ID NO: 7776 - DNA, 23 bp, Homo sapiens
  source 1..23: mol_type = genomic DNA
tgatttacttctaaaataagtgg

SEQ ID NO: 7777 - DNA, 23 bp, Homo sapiens
  source 1..23: mol_type = genomic DNA
aggaaaaaaaacacaaaaaacgg

SEQ ID NO: 7778 - DNA, 23 bp, Homo sapiens
  source 1..23: mol_type = genomic DNA
cacggattctattttctgcttgg

SEQ ID NO: 7779 - DNA, 23 bp, Homo sapiens
  source 1..23: mol_type = genomic DNA
gatcacagagtgccaggaattgg

SEQ ID NO: 7780 - DNA, 23 bp, Homo sapiens
  source 1..23: mol_type = genomic DNA
ttattttgacttcctgagaatgg

SEQ ID NO: 7781 - DNA, 23 bp, Homo sapiens
  source 1..23: mol_type = genomic DNA
aagaaattccctacaattcaggg

SEQ ID NO: 7782 - DNA, 23 bp, Homo sapiens
  source 1..23: mol_type = genomic DNA
attcctctagtattgctattcgg

SEQ ID NO: 7783 - DNA, 23 bp, Homo sapiens
  source 1..23: mol_type = genomic DNA
ttttgtgttggtaaatttgtcgg

SEQ ID NO: 7784 - DNA, 23 bp, Homo sapiens
  source 1..23: mol_type = genomic DNA
ggaaaaacacattaaatgatagg

SEQ ID NO: 7785 - DNA, 23 bp, Homo sapiens
  source 1..23: mol_type = genomic DNA
tagttactaatatttttcatagg

SEQ ID NO: 7786 - DNA, 23 bp, Homo sapiens
  source 1..23: mol_type = genomic DNA
atgaatttcatactgactactgg

SEQ ID NO: 7787 - DNA, 23 bp, Homo sapiens
  source 1..23: mol_type = genomic DNA
ccagaacaatgagaccaaatagg

SEQ ID NO: 7788 - DNA, 23 bp, Homo sapiens
  source 1..23: mol_type = genomic DNA
ggcacataattgtaattcatagg

SEQ ID NO: 7789 - DNA, 23 bp, Homo sapiens
  source 1..23: mol_type = genomic DNA
ggtgtccccccaccatccttagg

SEQ ID NO: 7790 - DNA, 23 bp, Homo sapiens
  source 1..23: mol_type = genomic DNA
tggccattcataatttgaaatgg

SEQ ID NO: 7791 - DNA, 23 bp, Homo sapiens
  source 1..23: mol_type = genomic DNA
aatatattaaaaacatctattgg

SEQ ID NO: 7792 - DNA, 23 bp, Homo sapiens
  source 1..23: mol_type = genomic DNA
tttcatatcctaaatggaaatgg

SEQ ID NO: 7793 - DNA, 23 bp, Homo sapiens
  source 1..23: mol_type = genomic DNA
acagaaccttttctcccattggg

SEQ ID NO: 7794 - DNA, 23 bp, Homo sapiens
  source 1..23: mol_type = genomic DNA
tctgcaaaagagattcagtttgg

SEQ ID NO: 7795 - DNA, 23 bp, Homo sapiens
  source 1..23: mol_type = genomic DNA
aatgacttcagcctgctttgtgg

SEQ ID NO: 7796 - DNA, 23 bp, Homo sapiens
  source 1..23: mol_type = genomic DNA
tgaagtttgagacagtaaaatgg

SEQ ID NO: 7797 - DNA, 23 bp, Homo sapiens
  source 1..23: mol_type = genomic DNA
gtatgtacctaggacctaatggg

SEQ ID NO: 7798 - DNA, 23 bp, Homo sapiens
  source 1..23: mol_type = genomic DNA
tcatagctccagtccccatatgg

SEQ ID NO: 7799 - DNA, 23 bp, Homo sapiens
  source 1..23: mol_type = genomic DNA
ttaatgtagcacttcagctttgg

SEQ ID NO: 7800 - DNA, 23 bp, Homo sapiens
  source 1..23: mol_type = genomic DNA
agagagcaggggaagaaaacagg

SEQ ID NO: 7801 - DNA, 23 bp, Homo sapiens
  source 1..23: mol_type = genomic DNA
cagtgaggtgaatttattaaggg

SEQ ID NO: 7802 - DNA, 23 bp, Homo sapiens
  source 1..23: mol_type = genomic DNA
ggaagtcattgaaaccttgtagg

SEQ ID NO: 7803 - DNA, 23 bp, Homo sapiens
  source 1..23: mol_type = genomic DNA
catccacttgataaaataatggg

SEQ ID NO: 7804 - DNA, 23 bp, Homo sapiens
  source 1..23: mol_type = genomic DNA
gcttgttaatgttaattccttgg

SEQ ID NO: 7805 - DNA, 23 bp, Homo sapiens
  source 1..23: mol_type = genomic DNA
atttgcttccccctcttcaatgg

SEQ ID NO: 7806 - DNA, 23 bp, Homo sapiens
  source 1..23: mol_type = genomic DNA
cgtttctatagctctcaaaaagg

SEQ ID NO: 7807 - DNA, 23 bp, Homo sapiens
  source 1..23: mol_type = genomic DNA
gctatgcttccaaagttctaagg

SEQ ID NO: 7808 - DNA, 23 bp, Homo sapiens
  source 1..23: mol_type = genomic DNA
ttactattcaagatattcttggg

SEQ ID NO: 7809 - DNA, 23 bp, Homo sapiens
  source 1..23: mol_type = genomic DNA
tagaagacaatgcattttaacgg

SEQ ID NO: 7810 - DNA, 23 bp, Homo sapiens
  source 1..23: mol_type = genomic DNA
gtaatggagtaaaatgttactgg

SEQ ID NO: 7811 - DNA, 23 bp, Homo sapiens
  source 1..23: mol_type = genomic DNA
ttttttcacaggcatttaatggg

SEQ ID NO: 7812 - DNA, 23 bp, Homo sapiens
  source 1..23: mol_type = genomic DNA
tggaaaggtgtatactactatgg

SEQ ID NO: 7813 - DNA, 23 bp, Homo sapiens
  source 1..23: mol_type = genomic DNA
tgtcatttaaatcttataagagg

SEQ ID NO: 7814 - DNA, 23 bp, Homo sapiens
  source 1..23: mol_type = genomic DNA
taactatcacattttctcatagg

SEQ ID NO: 7815 - DNA, 23 bp, Homo sapiens
  source 1..23: mol_type = genomic DNA
cagttaactctaaaattagatgg

SEQ ID NO: 7816 - DNA, 23 bp, Homo sapiens
  source 1..23: mol_type = genomic DNA
tctcaggaagtcaaaataaaggg

SEQ ID NO: 7817 - DNA, 23 bp, Homo sapiens
  source 1..23: mol_type = genomic DNA
gataaattctatttattgctagg

SEQ ID NO: 7818 - DNA, 23 bp, Homo sapiens
  source 1..23: mol_type = genomic DNA
cagcagtgctcatttctataggg

SEQ ID NO: 7819 - DNA, 23 bp, Homo sapiens
  source 1..23: mol_type = genomic DNA
atattagtagttgggccaatagg

SEQ ID NO: 7820 - DNA, 23 bp, Homo sapiens
  source 1..23: mol_type = genomic DNA
gcattacatgtattattaaaggg

SEQ ID NO: 7821 - DNA, 23 bp, Homo sapiens
  source 1..23: mol_type = genomic DNA
agttttatagagcatttgtatgg

SEQ ID NO: 7822 - DNA, 23 bp, Homo sapiens
  source 1..23: mol_type = genomic DNA
tttcctgatttccttccaattgg

SEQ ID NO: 7823 - DNA, 23 bp, Homo sapiens
  source 1..23: mol_type = genomic DNA
gttttttcatccaatggaaatgg

SEQ ID NO: 7824 - DNA, 23 bp, Homo sapiens
  source 1..23: mol_type = genomic DNA
gagtttggaatctttaatatagg

SEQ ID NO: 7825 - DNA, 23 bp, Homo sapiens
  source 1..23: mol_type = genomic DNA
tgtatgtacctaggacctaatgg

SEQ ID NO: 7826 - DNA, 23 bp, Homo sapiens
  source 1..23: mol_type = genomic DNA
catatattgatgttgcatatagg

SEQ ID NO: 7827 - DNA, 23 bp, Homo sapiens
  source 1..23: mol_type = genomic DNA
caaaaaagtagccatttaaaggg

SEQ ID NO: 7828 - DNA, 23 bp, Homo sapiens
  source 1..23: mol_type = genomic DNA
ttaaattctacattctctgctgg

SEQ ID NO: 7829 - DNA, 23 bp, Homo sapiens
  source 1..23: mol_type = genomic DNA
cgcattataggcatagtaatagg

SEQ ID NO: 7830 - DNA, 23 bp, Homo sapiens
  source 1..23: mol_type = genomic DNA
agtgctctatataaatatattgg

SEQ ID NO: 7831 - DNA, 23 bp, Homo sapiens
  source 1..23: mol_type = genomic DNA
tttattatctaattgatccttgg

SEQ ID NO: 7832 - DNA, 23 bp, Homo sapiens
  source 1..23: mol_type = genomic DNA
tctcccttagagctaaaaacagg

SEQ ID NO: 7833 - DNA, 23 bp, Homo sapiens
  source 1..23: mol_type = genomic DNA
cctgtcccttggcagaaacttgg

SEQ ID NO: 7834 - DNA, 23 bp, Homo sapiens
  source 1..23: mol_type = genomic DNA
ttcaatgtacaaactaacttagg

SEQ ID NO: 7835 - DNA, 23 bp, Homo sapiens
  source 1..23: mol_type = genomic DNA
ggcctcacgccctataaaactgg

SEQ ID NO: 7836 - DNA, 23 bp, Homo sapiens
  source 1..23: mol_type = genomic DNA
tgtttatgctcatagataatagg

SEQ ID NO: 7837 - DNA, 23 bp, Homo sapiens
  source 1..23: mol_type = genomic DNA
acagcttcctgtatgtctatagg

SEQ ID NO: 7838 - DNA, 23 bp, Homo sapiens
  source 1..23: mol_type = genomic DNA
actattttacaacaatatttggg

SEQ ID NO: 7839 - DNA, 23 bp, Homo sapiens
  source 1..23: mol_type = genomic DNA
cttgttctcatggaatccttagg

SEQ ID NO: 7840 - DNA, 23 bp, Homo sapiens
  source 1..23: mol_type = genomic DNA
ataaaacgtgattaattgcttgg

SEQ ID NO: 7841 - DNA, 23 bp, Homo sapiens
  source 1..23: mol_type = genomic DNA
ctagaggcaggcaaaataactgg

SEQ ID NO: 7842 - DNA, 23 bp, Homo sapiens
  source 1..23: mol_type = genomic DNA
gtaaatttagtacacaattaggg

SEQ ID NO: 7843 - DNA, 23 bp, Homo sapiens
  source 1..23: mol_type = genomic DNA
acatggtgggaagcaataaaagg

SEQ ID NO: 7844 - DNA, 23 bp, Homo sapiens
  source 1..23: mol_type = genomic DNA
tttctgcttctttagttgatagg

SEQ ID NO: 7845 - DNA, 23 bp, Homo sapiens
  source 1..23: mol_type = genomic DNA
gtgcctcaagactaaatattggg

SEQ ID NO: 7846 - DNA, 23 bp, Homo sapiens
  source 1..23: mol_type = genomic DNA
ggtccactcgtttcttccttagg

SEQ ID NO: 7847 - DNA, 23 bp, Homo sapiens
  source 1..23: mol_type = genomic DNA
tgttctttctaaacaaaatccgg

SEQ ID NO: 7848 - DNA, 23 bp, Homo sapiens
  source 1..23: mol_type = genomic DNA
atagtttctatatatttattagg

SEQ ID NO: 7849 - DNA, 23 bp, Homo sapiens
  source 1..23: mol_type = genomic DNA
aatatacatgattttccgttagg

SEQ ID NO: 7850 - DNA, 23 bp, Homo sapiens
  source 1..23: mol_type = genomic DNA
attcctgccaaattatttcatgg

SEQ ID NO: 7851 - DNA, 23 bp, Homo sapiens
  source 1..23: mol_type = genomic DNA
tagagcataacagggaaaaaagg

SEQ ID NO: 7852 - DNA, 23 bp, Homo sapiens
  source 1..23: mol_type = genomic DNA
atttgcagatttggtgaaaatgg

SEQ ID NO: 7853 - DNA, 23 bp, Homo sapiens
  source 1..23: mol_type = genomic DNA
ttactcaaagacgttctatctgg

SEQ ID NO: 7854 - DNA, 23 bp, Homo sapiens
  source 1..23: mol_type = genomic DNA
aaggaactatagaaaaagttagg

SEQ ID NO: 7855 - DNA, 23 bp, Homo sapiens
  source 1..23: mol_type = genomic DNA
atattactttgtcatcaaaaagg

SEQ ID NO: 7856 - DNA, 23 bp, Homo sapiens
  source 1..23: mol_type = genomic DNA
atgtccaactaataaaattaggg

SEQ ID NO: 7857 - DNA, 23 bp, Homo sapiens
  source 1..23: mol_type = genomic DNA
tctgttgtaatttttcactctgg

SEQ ID NO: 7858 - DNA, 23 bp, Homo sapiens
  source 1..23: mol_type = genomic DNA
agactcagtccccagaaaaatgg

SEQ ID NO: 7859 - DNA, 23 bp, Homo sapiens
  source 1..23: mol_type = genomic DNA
tatttagttgtataagtaatggg

SEQ ID NO: 7860 - DNA, 23 bp, Homo sapiens
  source 1..23: mol_type = genomic DNA
atactttgtatattcattgtagg

SEQ ID NO: 7861 - DNA, 23 bp, Homo sapiens
  source 1..23: mol_type = genomic DNA
gtataatataaacacaaaatagg

SEQ ID NO: 7862 - DNA, 23 bp, Homo sapiens
  source 1..23: mol_type = genomic DNA
ttactgatgtaatttataacagg

SEQ ID NO: 7863 - DNA, 23 bp, Homo sapiens
  source 1..23: mol_type = genomic DNA
ctaaagttatgtcaaataactgg

SEQ ID NO: 7864 - DNA, 23 bp, Homo sapiens
  source 1..23: mol_type = genomic DNA
gaatatatgcaatttctaatagg

SEQ ID NO: 7865 - DNA, 23 bp, Homo sapiens
  source 1..23: mol_type = genomic DNA
gcaacagcgctgacatttctagg

SEQ ID NO: 7866 - DNA, 23 bp, Homo sapiens
  source 1..23: mol_type = genomic DNA
gcttccctaattttattagttgg

SEQ ID NO: 7867 - DNA, 23 bp, Homo sapiens
  source 1..23: mol_type = genomic DNA
attctgtctccccagctaaatgg

SEQ ID NO: 7868 - DNA, 23 bp, Homo sapiens
  source 1..23: mol_type = genomic DNA
ctcactctcccaagtcaatatgg

SEQ ID NO: 7869 - DNA, 23 bp, Homo sapiens
  source 1..23: mol_type = genomic DNA
ttacttttgcttttactgatagg

SEQ ID NO: 7870 - DNA, 23 bp, Homo sapiens
  source 1..23: mol_type = genomic DNA
gtaagatcaaggaaaatattagg

SEQ ID NO: 7871 - DNA, 23 bp, Homo sapiens
  source 1..23: mol_type = genomic DNA
cgcagttttccaaaagaaatcgg

SEQ ID NO: 7872 - DNA, 23 bp, Homo sapiens
  source 1..23: mol_type = genomic DNA
ctaaacgaggtgaataaaatagg

SEQ ID NO: 7873 - DNA, 23 bp, Homo sapiens
  source 1..23: mol_type = genomic DNA
agaatattacaataatattaagg

SEQ ID NO: 7874 - DNA, 23 bp, Homo sapiens
  source 1..23: mol_type = genomic DNA
gtatgtctggggtagaaatttgg

SEQ ID NO: 7875 - DNA, 23 bp, Homo sapiens
  source 1..23: mol_type = genomic DNA
gactaccactgcttttagtatgg

SEQ ID NO: 7876 - DNA, 23 bp, Homo sapiens
  source 1..23: mol_type = genomic DNA
tatctttgtaatttgaaaatggg

SEQ ID NO: 7877 - DNA, 23 bp, Homo sapiens
  source 1..23: mol_type = genomic DNA
ctgatattaatgccataaatagg

SEQ ID NO: 7878 - DNA, 23 bp, Homo sapiens
  source 1..23: mol_type = genomic DNA
tatttcatcattccactgatagg

SEQ ID NO: 7879 - DNA, 23 bp, Homo sapiens
  source 1..23: mol_type = genomic DNA
ttagaattttcctaaggaaatgg

SEQ ID NO: 7880 - DNA, 23 bp, Homo sapiens
  source 1..23: mol_type = genomic DNA
taggttttattactgtttaatgg

SEQ ID NO: 7881 - DNA, 23 bp, Homo sapiens
  source 1..23: mol_type = genomic DNA
gtcaaagtcaatttacataatgg

SEQ ID NO: 7882 - DNA, 23 bp, Homo sapiens
  source 1..23: mol_type = genomic DNA
caccaacagcaacaacaaaaggg

SEQ ID NO: 7883 - DNA, 23 bp, Homo sapiens
  source 1..23: mol_type = genomic DNA
actagagaaggtaggcaaatagg

SEQ ID NO: 7884 - DNA, 23 bp, Homo sapiens
  source 1..23: mol_type = genomic DNA
tgaaatataaaccagcttcatgg

SEQ ID NO: 7885 - DNA, 23 bp, Homo sapiens
  source 1..23: mol_type = genomic DNA
tctttccttttctcagtggctgg

SEQ ID NO: 7886 - DNA, 23 bp, Homo sapiens
  source 1..23: mol_type = genomic DNA
taccccttctttcaagtaatggg

SEQ ID NO: 7887 - DNA, 23 bp, Homo sapiens
  source 1..23: mol_type = genomic DNA
tcaaatataatacatttaaatgg

SEQ ID NO: 7888 - DNA, 23 bp, Homo sapiens
  source 1..23: mol_type = genomic DNA
ttttccctacaggagtataaagg

SEQ ID NO: 7889 - DNA, 23 bp, Homo sapiens
  source 1..23: mol_type = genomic DNA
aatttagtcaaatttattacagg

SEQ ID NO: 7890 - DNA, 23 bp, Homo sapiens
  source 1..23: mol_type = genomic DNA
gcacttacatgaatgaaaaatgg

SEQ ID NO: 7891 - DNA, 23 bp, Homo sapiens
  source 1..23: mol_type = genomic DNA
gatggtaaatgagaataaaatgg

SEQ ID NO: 7892 - DNA, 23 bp, Homo sapiens
  source 1..23: mol_type = genomic DNA
aggtgttccttctctatatacgg

SEQ ID NO: 7893 - DNA, 23 bp, Homo sapiens
  source 1..23: mol_type = genomic DNA
gccttacctcaatttctctatgg

SEQ ID NO: 7894 - DNA, 23 bp, Homo sapiens
  source 1..23: mol_type = genomic DNA
ctatatttgtattattttagagg

SEQ ID NO: 7895 - DNA, 23 bp, Homo sapiens
  source 1..23: mol_type = genomic DNA
acaaatatcttcttattatgagg

SEQ ID NO: 7896 - DNA, 23 bp, Homo sapiens
  source 1..23: mol_type = genomic DNA
gtcctcataaacacacaaaatgg

SEQ ID NO: 7897 - DNA, 23 bp, Homo sapiens
  source 1..23: mol_type = genomic DNA
tgtctcctctttttaatagaagg

SEQ ID NO: 7898 - DNA, 23 bp, Homo sapiens
  source 1..23: mol_type = genomic DNA
tgtttctcctggataaatatagg

SEQ ID NO: 7899 - DNA, 23 bp, Homo sapiens
  source 1..23: mol_type = genomic DNA
aggaatgtcagtaaatttaatgg

SEQ ID NO: 7900 - DNA, 23 bp, Homo sapiens
  source 1..23: mol_type = genomic DNA
gcagctatatggagcacatttgg

SEQ ID NO: 7901 - DNA, 23 bp, Homo sapiens
  source 1..23: mol_type = genomic DNA
ccagcagtgctcatttctatagg

SEQ ID NO: 7902 - DNA, 23 bp, Homo sapiens
  source 1..23: mol_type = genomic DNA
tcatctgtatcatacctatttgg

SEQ ID NO: 7903 - DNA, 23 bp, Homo sapiens
  source 1..23: mol_type = genomic DNA
tctcagtagaacattaaaaatgg

SEQ ID NO: 7904 - DNA, 23 bp, Homo sapiens
  source 1..23: mol_type = genomic DNA
gaacatgactaaaatcttaaagg

SEQ ID NO: 7905 - DNA, 23 bp, Homo sapiens
  source 1..23: mol_type = genomic DNA
tttagcttagttcttctgtttgg

SEQ ID NO: 7906 - DNA, 23 bp, Homo sapiens
  source 1..23: mol_type = genomic DNA
aacagaagaactaagctaaatgg

SEQ ID NO: 7907 - DNA, 23 bp, Homo sapiens
  source 1..23: mol_type = genomic DNA
actttgtgttcaaggtaaaatgg

SEQ ID NO: 7908 - DNA, 23 bp, Homo sapiens
  source 1..23: mol_type = genomic DNA
ggagcaaaacgaccacaaatagg

SEQ ID NO: 7909 - DNA, 23 bp, Homo sapiens
  source 1..23: mol_type = genomic DNA
aagctgaagtgctacattaatgg

SEQ ID NO: 7910 - DNA, 23 bp, Homo sapiens
  source 1..23: mol_type = genomic DNA
agatttgctgaaggcttttaggg

SEQ ID NO: 7911 - DNA, 23 bp, Homo sapiens
  source 1..23: mol_type = genomic DNA
ccacatcataatcagaaaatagg

SEQ ID NO: 7912 - DNA, 23 bp, Homo sapiens
  source 1..23: mol_type = genomic DNA
tttctagataactattaaaatgg

SEQ ID NO: 7913 - DNA, 23 bp, Homo sapiens
  source 1..23: mol_type = genomic DNA
ccatccacttgataaaataatgg

SEQ ID NO: 7914 - DNA, 23 bp, Homo sapiens
  source 1..23: mol_type = genomic DNA
aatagtctgacactctaaattgg

SEQ ID NO: 7915 - DNA, 23 bp, Homo sapiens
  source 1..23: mol_type = genomic DNA
tcattcatatactctataaaagg

SEQ ID NO: 7916 - DNA, 23 bp, Homo sapiens
  source 1..23: mol_type = genomic DNA
ccttttggtcaggtgcaattagg

SEQ ID NO: 7917 - DNA, 23 bp, Homo sapiens
  source 1..23: mol_type = genomic DNA
aataaatctgcattgaaaaatgg

SEQ ID NO: 7918 - DNA, 23 bp, Homo sapiens
  source 1..23: mol_type = genomic DNA
tctgatgtattttatcctattgg

SEQ ID NO: 7919 - DNA, 23 bp, Homo sapiens
  source 1..23: mol_type = genomic DNA
atagggcatacacattttaaagg

SEQ ID NO: 7920 - DNA, 23 bp, Homo sapiens
  source 1..23: mol_type = genomic DNA
cacatcgctttattgtaaaatgg

SEQ ID NO: 7921 - DNA, 23 bp, Homo sapiens
  source 1..23: mol_type = genomic DNA
aattaaacaaatacacaaaatgg

SEQ ID NO: 7922 - DNA, 23 bp, Homo sapiens
  source 1..23: mol_type = genomic DNA
tgagaagcattgttactaaatgg

SEQ ID NO: 7923 - DNA, 23 bp, Homo sapiens
  source 1..23: mol_type = genomic DNA
tagcgccctcaaatacatttagg

SEQ ID NO: 7924 - DNA, 23 bp, Homo sapiens
  source 1..23: mol_type = genomic DNA
ttaagggattaaggagaaaatgg

SEQ ID NO: 7925 - DNA, 23 bp, Homo sapiens
  source 1..23: mol_type = genomic DNA
ttacactctctgaatgcttttgg

SEQ ID NO: 7926 - DNA, 23 bp, Homo sapiens
  source 1..23: mol_type = genomic DNA
tggcttccaccattgtaattagg

SEQ ID NO: 7927 - DNA, 23 bp, Homo sapiens
  source 1..23: mol_type = genomic DNA
cattgatgtgatattctaaaagg

SEQ ID NO: 7928 - DNA, 23 bp, Homo sapiens
  source 1..23: mol_type = genomic DNA
ccagttatccagaagattaaagg

SEQ ID NO: 7929 - DNA, 23 bp, Homo sapiens
  source 1..23: mol_type = genomic DNA
gcatgaaagctgatgttttatgg

SEQ ID NO: 7930 - DNA, 23 bp, Homo sapiens
  source 1..23: mol_type = genomic DNA
atgccatcttatttgttaatagg

SEQ ID NO: 7931 - DNA, 23 bp, Homo sapiens
  source 1..23: mol_type = genomic DNA
atagagtatatgaatgaaattgg

SEQ ID NO: 7932 - DNA, 23 bp, Homo sapiens
  source 1..23: mol_type = genomic DNA
tggaagctataccaagaaaatgg

SEQ ID NO: 7933 - DNA, 23 bp, Homo sapiens
  source 1..23: mol_type = genomic DNA
cttgacatctttgtattaatagg

SEQ ID NO: 7934 - DNA, 23 bp, Homo sapiens
  source 1..23: mol_type = genomic DNA
ttattgctctttaaaatatatgg

SEQ ID NO: 7935 - DNA, 23 bp, Homo sapiens
  source 1..23: mol_type = genomic DNA
tcatgtgacataaatttaattgg

SEQ ID NO: 7936 - DNA, 23 bp, Homo sapiens
  source 1..23: mol_type = genomic DNA
tgtgagatatgcccttttatagg

SEQ ID NO: 7937 - DNA, 23 bp, Homo sapiens
  source 1..23: mol_type = genomic DNA
tgcggagtagttttgtttaatgg

SEQ ID NO: 7938 - DNA, 23 bp, Homo sapiens
  source 1..23: mol_type = genomic DNA
ataaaatgaatgaagctaaatgg

SEQ ID NO: 7939 - DNA, 23 bp, Homo sapiens
  source 1..23: mol_type = genomic DNA
gtagaaagccatttccatttagg

SEQ ID NO: 7940 - DNA, 23 bp, Homo sapiens
  source 1..23: mol_type = genomic DNA
gcaaagatattatcatttaatgg

SEQ ID NO: 7941 - DNA, 23 bp, Homo sapiens
  source 1..23: mol_type = genomic DNA
ttttctttgcattaactaaaagg

SEQ ID NO: 7942 - DNA, 23 bp, Homo sapiens
  source 1..23: mol_type = genomic DNA
aggaaatcctttcaaaaaattgg

SEQ ID NO: 7943 - DNA, 23 bp, Homo sapiens
  source 1..23: mol_type = genomic DNA
tgacaaaccatgaaataatttgg

SEQ ID NO: 7944 - DNA, 23 bp, Homo sapiens
  source 1..23: mol_type = genomic DNA
ttatattcaaagtattttaatgg

SEQ ID NO: 7945 - DNA, 23 bp, Homo sapiens
  source 1..23: mol_type = genomic DNA
ttaaaatgtgttcctctaattgg

SEQ ID NO: 7946 - DNA, 23 bp, Homo sapiens
  source 1..23: mol_type = genomic DNA
gtatctttgtaatttgaaaatgg

SEQ ID NO: 7947 - DNA, 23 bp, Homo sapiens
  source 1..23: mol_type = genomic DNA
ccaatgaaagacatttttattgg

SEQ ID NO: 7948 - DNA, 23 bp, Homo sapiens
  source 1..23: mol_type = genomic DNA
aaaaccataagtaacccgaaagg

SEQ ID NO: 7949 - DNA, 23 bp, Homo sapiens
  source 1..23: mol_type = genomic DNA
atcacggtcagtctagcacaggg

SEQ ID NO: 7950 - DNA, 23 bp, Homo sapiens
  source 1..23: mol_type = genomic DNA
gagcatgctatttagccatgagg

SEQ ID NO: 7951 - DNA, 23 bp, Homo sapiens
  source 1..23: mol_type = genomic DNA
gaaaggactactttccaacatgg

SEQ ID NO: 7952 - DNA, 23 bp, Homo sapiens
  source 1..23: mol_type = genomic DNA
gtttgtgcctgagaaagcatagg

SEQ ID NO: 7953 - DNA, 23 bp, Homo sapiens
  source 1..23: mol_type = genomic DNA
atctgcagagaagggtttggggg

SEQ ID NO: 7954 - DNA, 23 bp, Homo sapiens
  source 1..23: mol_type = genomic DNA
aattcatcaggtccataccctgg

SEQ ID NO: 7955 - DNA, 23 bp, Homo sapiens
  source 1..23: mol_type = genomic DNA
tgaccgtgatctgcagagaaggg

SEQ ID NO: 7956 - DNA, 23 bp, Homo sapiens
  source 1..23: mol_type = genomic DNA
gaaggcacttaatatcatgttgg

SEQ ID NO: 7957 - DNA, 23 bp, Homo sapiens
  source 1..23: mol_type = genomic DNA
actccaacatttatatgggatgg

SEQ ID NO: 7958 - DNA, 23 bp, Homo sapiens
  source 1..23: mol_type = genomic DNA
tttcattgtgtgttacacaatgg

SEQ ID NO: 7959 - DNA, 23 bp, Homo sapiens
  source 1..23: mol_type = genomic DNA
gaaatttttagtcctttccaggg

SEQ ID NO: 7960 - DNA, 23 bp, Homo sapiens
  source 1..23: mol_type = genomic DNA
gatcacggtcagtctagcacagg

SEQ ID NO: 7961 - DNA, 23 bp, Homo sapiens
  source 1..23: mol_type = genomic DNA
tgggatggtactcttcaatccgg

SEQ ID NO: 7962 - DNA, 23 bp, Homo sapiens
  source 1..23: mol_type = genomic DNA
gtaccatcccatataaatgttgg

SEQ ID NO: 7963 - DNA, 23 bp, Homo sapiens
  source 1..23: mol_type = genomic DNA
gggggagtggatagagaggaggg

SEQ ID NO: 7964 - DNA, 23 bp, Homo sapiens
  source 1..23: mol_type = genomic DNA
ttctttctctcaacagtgggtgg

SEQ ID NO: 7965 - DNA, 23 bp, Homo sapiens
  source 1..23: mol_type = genomic DNA
tgaatgtgtggagagctcttagg

SEQ ID NO: 7966 - DNA, 23 bp, Homo sapiens
  source 1..23: mol_type = genomic DNA
gtggggttcttccatgacattgg

SEQ ID NO: 7967 - DNA, 23 bp, Homo sapiens
  source 1..23: mol_type = genomic DNA
ataattgtatagaatttagtggg

SEQ ID NO: 7968 - DNA, 23 bp, Homo sapiens
  source 1..23: mol_type = genomic DNA
attcatatgtaccatatcatagg

SEQ ID NO: 7969 - DNA, 23 bp, Homo sapiens
  source 1..23: mol_type = genomic DNA
ttatggatgcctgtttttgccgg

SEQ ID NO: 7970 - DNA, 23 bp, Homo sapiens
  source 1..23: mol_type = genomic DNA
tgatctgcagagaagggtttggg

SEQ ID NO: 7971 - DNA, 23 bp, Homo sapiens
  source 1..23: mol_type = genomic DNA
atataaatgatattcgaaattgg

SEQ ID NO: 7972 - DNA, 23 bp, Homo sapiens
  source 1..23: mol_type = genomic DNA
tgttctatattcctatgatatgg

SEQ ID NO: 7973 - DNA, 23 bp, Homo sapiens
  source 1..23: mol_type = genomic DNA
cagacactgatatcacactgagg

SEQ ID NO: 7974 - DNA, 23 bp, Homo sapiens
  source 1..23: mol_type = genomic DNA
tctcacaagtaagctcactgggg

SEQ ID NO: 7975 - DNA, 23 bp, Homo sapiens
  source 1..23: mol_type = genomic DNA
caaaacctaagcaaaccctgggg

SEQ ID NO: 7976 - DNA, 23 bp, Homo sapiens
  source 1..23: mol_type = genomic DNA
taattggagttattccacagggg

SEQ ID NO: 7977 - DNA, 23 bp, Homo sapiens
  source 1..23: mol_type = genomic DNA
gaagccaagtaatagagacgggg

SEQ ID NO: 7978 - DNA, 23 bp, Homo sapiens
  source 1..23: mol_type = genomic DNA
gcatcagtaagaaaacaaggagg

SEQ ID NO: 7979 - DNA, 23 bp, Homo sapiens
  source 1..23: mol_type = genomic DNA
acatatgagtgtatacactgagg

SEQ ID NO: 7980 - DNA, 23 bp, Homo sapiens
  source 1..23: mol_type = genomic DNA
gtgtgtaagagcaagcaaggagg

SEQ ID NO: 7981 - DNA, 23 bp, Homo sapiens
  source 1..23: mol_type = genomic DNA
gtactgtgctgttaggcacgggg

SEQ ID NO: 7982 - DNA, 23 bp, Homo sapiens
  source 1..23: mol_type = genomic DNA
tgggcactataaatatgacaagg

SEQ ID NO: 7983 - DNA, 23 bp, Homo sapiens
  source 1..23: mol_type = genomic DNA
tataagaggagagagccatgtgg

SEQ ID NO: 7984 - DNA, 23 bp, Homo sapiens
  source 1..23: mol_type = genomic DNA
gtggcactaacaaaaacacaagg

SEQ ID NO: 7985 - DNA, 23 bp, Homo sapiens
  source 1..23: mol_type = genomic DNA
tcagcaacgtaatgaagacgagg

SEQ ID NO: 7986 - DNA, 23 bp, Homo sapiens
  source 1..23: mol_type = genomic DNA
aagaaatatttacaacaacgtgg

SEQ ID NO: 7987 - DNA, 23 bp, Homo sapiens
  source 1..23: mol_type = genomic DNA
gcataagatggaaatcctagggg

SEQ ID NO: 7988 - DNA, 23 bp, Homo sapiens
  source 1..23: mol_type = genomic DNA
atgtagcacatacacaccagggg

SEQ ID NO: 7989 - DNA, 23 bp, Homo sapiens
  source 1..23: mol_type = genomic DNA
atgtgtacttctaaacagtgagg

SEQ ID NO: 7990 - DNA, 23 bp, Homo sapiens
  source 1..23: mol_type = genomic DNA
gagacagtgaaccaagcatgggg

SEQ ID NO: 7991 - DNA, 23 bp, Homo sapiens
  source 1..23: mol_type = genomic DNA
tgagaaataagattagcccgtgg

SEQ ID NO: 7992 - DNA, 23 bp, Homo sapiens
  source 1..23: mol_type = genomic DNA
aatttggagcctgatatgagtgg

SEQ ID NO: 7993 - DNA, 23 bp, Homo sapiens
  source 1..23: mol_type = genomic DNA
gagcgatgccttaatgaaggtgg

SEQ ID NO: 7994 - DNA, 23 bp, Homo sapiens
  source 1..23: mol_type = genomic DNA
atacactcaagtgacaggagagg

SEQ ID NO: 7995 - DNA, 23 bp, Homo sapiens
  source 1..23: mol_type = genomic DNA
cacatgttactgctccaatgtgg

SEQ ID NO: 7996 - DNA, 23 bp, Homo sapiens
  source 1..23: mol_type = genomic DNA
acggggccccctaacaaacaggg

SEQ ID NO: 7997 - DNA, 23 bp, Homo sapiens
  source 1..23: mol_type = genomic DNA
cataggcatactatttacggagg

SEQ ID NO: 7998 - DNA, 23 bp, Homo sapiens
  source 1..23: mol_type = genomic DNA
gtaatgatgccaatgatgagagg

SEQ ID NO: 7999 - DNA, 23 bp, Homo sapiens
  source 1..23: mol_type = genomic DNA
atacatgtgttaaatccatgtgg

SEQ ID NO: 8000 - DNA, 23 bp, Homo sapiens
  source 1..23: mol_type = genomic DNA
acattgccgagaatatgacctgg

SEQ ID NO: 8001 - DNA, 23 bp, Homo sapiens
  source 1..23: mol_type = genomic DNA
aatattgctaggtatgctagggg

SEQ ID NO: 8002 - DNA, 23 bp, Homo sapiens
  source 1..23: mol_type = genomic DNA
gattatgggaaactggaaggagg

SEQ ID NO: 8003 - DNA, 23 bp, Homo sapiens
  source 1..23: mol_type = genomic DNA
ataggggacagtcacccacatgg

SEQ ID NO: 8004 - DNA, 23 bp, Homo sapiens
  source 1..23: mol_type = genomic DNA
ggtgtttaagcaggtcagggcgg

SEQ ID NO: 8005 - DNA, 23 bp, Homo sapiens
  source 1..23: mol_type = genomic DNA
gtgctgcaaatgaattgaggagg

SEQ ID NO: 8006 - DNA, 23 bp, Homo sapiens
  source 1..23: mol_type = genomic DNA
aagtgaatatatgctatgaaggg

SEQ ID NO: 8007 - DNA, 23 bp, Homo sapiens
  source 1..23: mol_type = genomic DNA
aattgatgagatatatactgagg

SEQ ID NO: 8008 - DNA, 23 bp, Homo sapiens
  source 1..23: mol_type = genomic DNA
ggttgaaggacacattgtggagg

SEQ ID NO: 8009 - DNA, 23 bp, Homo sapiens
  source 1..23: mol_type = genomic DNA
aggtgagctaagcattacacagg

SEQ ID NO: 8010 - DNA, 23 bp, Homo sapiens
  source 1..23: mol_type = genomic DNA
gacttaagaaggtaatcttgggg

SEQ ID NO: 8011 - DNA, 23 bp, Homo sapiens
  source 1..23: mol_type = genomic DNA
gtgagtaaaattgattgacgtgg

SEQ ID NO: 8012 - DNA, 23 bp, Homo sapiens
  source 1..23: mol_type = genomic DNA
ccactggcattatcaaacacagg

SEQ ID NO: 8013 - DNA, 23 bp, Homo sapiens
  source 1..23: mol_type = genomic DNA
atacatcaggttgacctgggagg

SEQ ID NO: 8014 - DNA, 23 bp, Homo sapiens
  source 1..23: mol_type = genomic DNA
gataccagagataggtccagagg

SEQ ID NO: 8015 - DNA, 23 bp, Homo sapiens
  source 1..23: mol_type = genomic DNA
gtagggcatatggttaggggagg

SEQ ID NO: 8016 - DNA, 23 bp, Homo sapiens
  source 1..23: mol_type = genomic DNA
tatcacatagagtgttagagggg

SEQ ID NO: 8017 - DNA, 23 bp, Homo sapiens
  source 1..23: mol_type = genomic DNA
actcccgtctcaaatataagggg

SEQ ID NO: 8018 - DNA, 23 bp, Homo sapiens
  source 1..23: mol_type = genomic DNA
gatgataaaaacatattttgggg

SEQ ID NO: 8019 - DNA, 23 bp, Homo sapiens
  source 1..23: mol_type = genomic DNA
aataaagtgataatgagaggggg

SEQ ID NO: 8020 - DNA, 23 bp, Homo sapiens
  source 1..23: mol_type = genomic DNA
aacagaagtagggaaagaggggg

SEQ ID NO: 8021 - DNA, 23 bp, Homo sapiens
  source 1..23: mol_type = genomic DNA
atactattttgtttactgggggg

SEQ ID NO: 8022 - DNA, 23 bp, Homo sapiens
  source 1..23: mol_type = genomic DNA
tcttagagtgtattggacgtggg

SEQ ID NO: 8023 - DNA, 23 bp, Homo sapiens
  source 1..23: mol_type = genomic DNA
ttacaaacaccctaaaagggggg

SEQ ID NO: 8024 - DNA, 23 bp, Homo sapiens
  source 1..23: mol_type = genomic DNA
cctgtgtttgataatgccagtgg

SEQ ID NO: 8025 - DNA, 23 bp, Homo sapiens
  source 1..23: mol_type = genomic DNA
gcacaaatcacaagagatggggg

SEQ ID NO: 8026 - DNA, 23 bp, Homo sapiens
  source 1..23: mol_type = genomic DNA
aatgtagcacatacacaccaggg

SEQ ID NO: 8027 - DNA, 23 bp, Homo sapiens
  source 1..23: mol_type = genomic DNA
tgactgtgagagaatgagggagg

SEQ ID NO: 8028 - DNA, 23 bp, Homo sapiens
  source 1..23: mol_type = genomic DNA
agggagagaaatccctatggggg

SEQ ID NO: 8029 - DNA, 23 bp, Homo sapiens
  source 1..23: mol_type = genomic DNA
taggtccagaggtattgctgtgg

SEQ ID NO: 8030 - DNA, 23 bp, Homo sapiens
  source 1..23: mol_type = genomic DNA
acatgaatagaataattcagagg

SEQ ID NO: 8031 - DNA, 23 bp, Homo sapiens
  source 1..23: mol_type = genomic DNA
acttatgcatgggattggggagg

SEQ ID NO: 8032 - DNA, 23 bp, Homo sapiens
  source 1..23: mol_type = genomic DNA
gcatgagggaagacagcaggagg

SEQ ID NO: 8033 - DNA, 23 bp, Homo sapiens
  source 1..23: mol_type = genomic DNA
aaatattgcaagcaagcacgggg

SEQ ID NO: 8034 - DNA, 23 bp, Homo sapiens
  source 1..23: mol_type = genomic DNA
aagacacagaatagtcagagagg

SEQ ID NO: 8035 - DNA, 23 bp, Homo sapiens
  source 1..23: mol_type = genomic DNA
atagtgggaagcttgattggtgg

SEQ ID NO: 8036 - DNA, 23 bp, Homo sapiens
  source 1..23: mol_type = genomic DNA
tgtgtgacacgataaattggagg

SEQ ID NO: 8037 - DNA, 23 bp, Homo sapiens
  source 1..23: mol_type = genomic DNA
aataagtcattattactcagtgg

SEQ ID NO: 8038 - DNA, 23 bp, Homo sapiens
  source 1..23: mol_type = genomic DNA
gtatcatacgtacacatatgggg

SEQ ID NO: 8039 - DNA, 23 bp, Homo sapiens
  source 1..23: mol_type = genomic DNA
tctatatgaggaagactcagtgg

SEQ ID NO: 8040 - DNA, 23 bp, Homo sapiens
  source 1..23: mol_type = genomic DNA
atatatagcagttactacagtgg

SEQ ID NO: 8041 - DNA, 23 bp, Homo sapiens
  source 1..23: mol_type = genomic DNA
aaacaaaccagctcttcacgagg

SEQ ID NO: 8042 - DNA, 23 bp, Homo sapiens
  source 1..23: mol_type = genomic DNA
ctatgtactttgcttcagggagg

SEQ ID NO: 8043 - DNA, 23 bp, Homo sapiens
  source 1..23: mol_type = genomic DNA
gttataagccacaggcagagagg

SEQ ID NO: 8044 - DNA, 23 bp, Homo sapiens
  source 1..23: mol_type = genomic DNA
gcattcgggaaactttaagtcgg

SEQ ID NO: 8045 - DNA, 23 bp, Homo sapiens
  source 1..23: mol_type = genomic DNA
gctgccagaattctatagcaggg

SEQ ID NO: 8046 - DNA, 23 bp, Homo sapiens
  source 1..23: mol_type = genomic DNA
gcaatgttggatattcaaagagg

SEQ ID NO: 8047 - DNA, 23 bp, Homo sapiens
  source 1..23: mol_type = genomic DNA
atttggtaatatttacacaaagg

SEQ ID NO: 8048 - DNA, 23 bp, Homo sapiens
  source 1..23: mol_type = genomic DNA
caataaagtgataatgagagggg

SEQ ID NO: 8049 - DNA, 23 bp, Homo sapiens
  source 1..23: mol_type = genomic DNA
tctagtgcataaagaacctgagg

SEQ ID NO: 8050 - DNA, 23 bp, Homo sapiens
  source 1..23: mol_type = genomic DNA
cttacaaacaccctaaaaggggg

SEQ ID NO: 8051 - DNA, 23 bp, Homo sapiens
  source 1..23: mol_type = genomic DNA
gctataatttatggtcccagagg

SEQ ID NO: 8052 - DNA, 23 bp, Homo sapiens
  source 1..23: mol_type = genomic DNA
cttactctactcagtgcctgagg

SEQ ID NO: 8053 - DNA, 23 bp, Homo sapiens
  source 1..23: mol_type = genomic DNA
tatcaaagtcagcattaaggggg

SEQ ID NO: 8054 - DNA, 23 bp, Homo sapiens
  source 1..23: mol_type = genomic DNA
agagcaggtacagcctgtagggg

SEQ ID NO: 8055 - DNA, 23 bp, Homo sapiens
  source 1..23: mol_type = genomic DNA
caatatttttgacagtacagagg

SEQ ID NO: 8056 - DNA, 23 bp, Homo sapiens
  source 1..23: mol_type = genomic DNA
agaaagtaattggcaaacagagg

SEQ ID NO: 8057 - DNA, 23 bp, Homo sapiens
  source 1..23: mol_type = genomic DNA
ttaagtccttcgagatgacaagg

SEQ ID NO: 8058 - DNA, 23 bp, Homo sapiens
  source 1..23: mol_type = genomic DNA
aacactctatgtgatagtggagg

SEQ ID NO: 8059 - DNA, 23 bp, Homo sapiens
  source 1..23: mol_type = genomic DNA
agaacaacagaagctgtttgggg

SEQ ID NO: 8060 - DNA, 23 bp, Homo sapiens
  source 1..23: mol_type = genomic DNA
gtaactcttctattacgatgagg

SEQ ID NO: 8061 - DNA, 23 bp, Homo sapiens
  source 1..23: mol_type = genomic DNA
atatatactcagctacaagtggg

SEQ ID NO: 8062 - DNA, 23 bp, Homo sapiens
  source 1..23: mol_type = genomic DNA
attgccttactgttagacaaggg

SEQ ID NO: 8063 - DNA, 23 bp, Homo sapiens
  source 1..23: mol_type = genomic DNA
tcaaagatctctaaagatggggg

SEQ ID NO: 8064 - DNA, 23 bp, Homo sapiens
  source 1..23: mol_type = genomic DNA
cttgaacagagctttttacgagg

SEQ ID NO: 8065 - DNA, 23 bp, Homo sapiens
  source 1..23: mol_type = genomic DNA
actatgccttgtcatctcgaagg

SEQ ID NO: 8066 - DNA, 23 bp, Homo sapiens
  source 1..23: mol_type = genomic DNA
agagacagcaaacaatgttgagg

SEQ ID NO: 8067 - DNA, 23 bp, Homo sapiens
  source 1..23: mol_type = genomic DNA
gtacatagcagtatcccacttgg

SEQ ID NO: 8068 - DNA, 23 bp, Homo sapiens
  source 1..23: mol_type = genomic DNA
atcatgctgcataaaaccagtgg

SEQ ID NO: 8069 - DNA, 23 bp, Homo sapiens
  source 1..23: mol_type = genomic DNA
atactcagctacaagtgggtcgg

SEQ ID NO: 8070 - DNA, 23 bp, Homo sapiens
  source 1..23: mol_type = genomic DNA
gtatacttgtgtgctgtgagagg

SEQ ID NO: 8071 - DNA, 23 bp, Homo sapiens
  source 1..23: mol_type = genomic DNA
agtaaactagccaaggatggagg

SEQ ID NO: 8072 - DNA, 23 bp, Homo sapiens
  source 1..23: mol_type = genomic DNA
ttgctcttacacatttttggggg

SEQ ID NO: 8073 - DNA, 23 bp, Homo sapiens
  source 1..23: mol_type = genomic DNA
gagggacaagttgtgccaggagg

SEQ ID NO: 8074 - DNA, 23 bp, Homo sapiens
  source 1..23: mol_type = genomic DNA
tcaaacgacagtaaaagtgaagg

SEQ ID NO: 8075 - DNA, 23 bp, Homo sapiens
  source 1..23: mol_type = genomic DNA
catgcacgtgttttccatagggg

SEQ ID NO: 8076 - DNA, 23 bp, Homo sapiens
  source 1..23: mol_type = genomic DNA
ggatatctatccttgccttgagg

SEQ ID NO: 8077 - DNA, 23 bp, Homo sapiens
  source 1..23: mol_type = genomic DNA
ataaaagaatgagtaatacaagg

SEQ ID NO: 8078 - DNA, 23 bp, Homo sapiens
  source 1..23: mol_type = genomic DNA
ataattggagttattccacaggg

SEQ ID NO: 8079 - DNA, 23 bp, Homo sapiens
  source 1..23: mol_type = genomic DNA
aattttgatgatacactctgtgg

SEQ ID NO: 8080 - DNA, 23 bp, Homo sapiens
  source 1..23: mol_type = genomic DNA
gctcttaaaagtagatgtagggg

SEQ ID NO: 8081 - DNA, 23 bp, Homo sapiens
  source 1..23: mol_type = genomic DNA
gagtttccaagatctgctgaggg

SEQ ID NO: 8082 - DNA, 23 bp, Homo sapiens
  source 1..23: mol_type = genomic DNA
aatacatcatttattccactagg

SEQ ID NO: 8083 - DNA, 23 bp, Homo sapiens
  source 1..23: mol_type = genomic DNA
gtagaagtagaagaatccacggg

SEQ ID NO: 8084 - DNA, 23 bp, Homo sapiens
  source 1..23: mol_type = genomic DNA
atcctgttggctgaaagcagtgg

SEQ ID NO: 8085 - DNA, 23 bp, Homo sapiens
  source 1..23: mol_type = genomic DNA
tgtattatcttactacaactagg

SEQ ID NO: 8086 - DNA, 23 bp, Homo sapiens
  source 1..23: mol_type = genomic DNA
atgttggatattcaaagaggagg

SEQ ID NO: 8087 - DNA, 23 bp, Homo sapiens
  source 1..23: mol_type = genomic DNA
gcacattgtatgttatacacagg

SEQ ID NO: 8088 - DNA, 23 bp, Homo sapiens
  source 1..23: mol_type = genomic DNA
tatacttgtgtgctgtgagaggg

SEQ ID NO: 8089 - DNA, 23 bp, Homo sapiens
  source 1..23: mol_type = genomic DNA
taatggttataaaaaacatgagg

SEQ ID NO: 8090 - DNA, 23 bp, Homo sapiens
  source 1..23: mol_type = genomic DNA
ctaaatgcagacacacctagtgg

SEQ ID NO: 8091 - DNA, 23 bp, Homo sapiens
  source 1..23: mol_type = genomic DNA
ttcgagatgacaaggcatagtgg

SEQ ID NO: 8092 - DNA, 23 bp, Homo sapiens
  source 1..23: mol_type = genomic DNA
tagtagatttgagacccacatgg

SEQ ID NO: 8093 - DNA, 23 bp, Homo sapiens
  source 1..23: mol_type = genomic DNA
gcattaagcaacaccaacaaggg

SEQ ID NO: 8094 - DNA, 23 bp, Homo sapiens
  source 1..23: mol_type = genomic DNA
atgataaaataagtatcaggcgg

SEQ ID NO: 8095 - DNA, 23 bp, Homo sapiens
  source 1..23: mol_type = genomic DNA
ataagaggagagagccatgtggg

SEQ ID NO: 8096 - DNA, 23 bp, Homo sapiens
  source 1..23: mol_type = genomic DNA
aggttctttatgcactagagagg

SEQ ID NO: 8097 - DNA, 23 bp, Homo sapiens
  source 1..23: mol_type = genomic DNA
tcagtgctatctttacagcatgg

SEQ ID NO: 8098 - DNA, 23 bp, Homo sapiens
  source 1..23: mol_type = genomic DNA
agctcttctagattactggaagg

SEQ ID NO: 8099 - DNA, 23 bp, Homo sapiens
  source 1..23: mol_type = genomic DNA
aatttagtgatatatgtgaaagg

SEQ ID NO: 8100 - DNA, 23 bp, Homo sapiens
  source 1..23: mol_type = genomic DNA
ctaacattactaattactgaagg

SEQ ID NO: 8101 - DNA, 23 bp, Homo sapiens
  source 1..23: mol_type = genomic DNA
tacaatacaatcgcaaactgggg

SEQ ID NO: 8102 - DNA, 23 bp, Homo sapiens
  source 1..23: mol_type = genomic DNA
agaggctggagcgctctgcgtgg

SEQ ID NO: 8103 - DNA, 23 bp, Homo sapiens
  source 1..23: mol_type = genomic DNA
tatatttgagacgggagtggggg

SEQ ID NO: 8104 - DNA, 23 bp, Homo sapiens
  source 1..23: mol_type = genomic DNA
ttacggacaatgattaacactgg

SEQ ID NO: 8105 - DNA, 23 bp, Homo sapiens
  source 1..23: mol_type = genomic DNA
agattgatgataatcttgagtgg

SEQ ID NO: 8106 - DNA, 23 bp, Homo sapiens
  source 1..23: mol_type = genomic DNA
tacatgtgttaaatccatgtggg

SEQ ID NO: 8107 - DNA, 23 bp, Homo sapiens
  source 1..23: mol_type = genomic DNA
gctcaagagggactttgctgagg

SEQ ID NO: 8108 - DNA, 23 bp, Homo sapiens
  source 1..23: mol_type = genomic DNA
ggtttaaagaggccagtaggtgg

SEQ ID NO: 8109 - DNA, 23 bp, Homo sapiens
  source 1..23: mol_type = genomic DNA
taccagatatgctatgctagagg

SEQ ID NO: 8110 - DNA, 23 bp, Homo sapiens
  source 1..23: mol_type = genomic DNA
ggaaaatgagtaattagcagagg

SEQ ID NO: 8111 - DNA, 23 bp, Homo sapiens
  source 1..23: mol_type = genomic DNA
catcactcgttctcccacacagg

SEQ ID NO: 8112 - DNA, 23 bp, Homo sapiens
  source 1..23: mol_type = genomic DNA
gccttataaatgttacagcgtgg

SEQ ID NO: 8113 - DNA, 23 bp, Homo sapiens
  source 1..23: mol_type = genomic DNA
tgagttcgaaaagttatggaggg

SEQ ID NO: 8114 - DNA, 23 bp, Homo sapiens
  source 1..23: mol_type = genomic DNA
aatctaccagattttcaacatgg

SEQ ID NO: 8115 - DNA, 23 bp, Homo sapiens
  source 1..23: mol_type = genomic DNA
ttacattgacatgcttaaggggg

SEQ ID NO: 8116 - DNA, 23 bp, Homo sapiens
  source 1..23: mol_type = genomic DNA
agtatgtaactaactcaagtggg

SEQ ID NO: 8117 - DNA, 23 bp, Homo sapiens
  source 1..23: mol_type = genomic DNA
gttatagtccaaaaacctagagg

SEQ ID NO: 8118 - DNA, 23 bp, Homo sapiens
  source 1..23: mol_type = genomic DNA
aagcagatgatgatgccctatgg

SEQ ID NO: 8119 - DNA, 23 bp, Homo sapiens
  source 1..23: mol_type = genomic DNA
tgaaaattgatgtatgcatgagg

SEQ ID NO: 8120 - DNA, 23 bp, Homo sapiens
  source 1..23: mol_type = genomic DNA
agaacattatataagtacctagg

SEQ ID NO: 8121 - DNA, 23 bp, Homo sapiens
  source 1..23: mol_type = genomic DNA
gtgatagaatcgcattgcagggg

SEQ ID NO: 8122 - DNA, 23 bp, Homo sapiens
  source 1..23: mol_type = genomic DNA
tgagaggtgatgtagcatctcgg

SEQ ID NO: 8123 - DNA, 23 bp, Homo sapiens
  source 1..23: mol_type = genomic DNA
aaaatgctaggactgtccactgg

SEQ ID NO: 8124 - DNA, 23 bp, Homo sapiens
  source 1..23: mol_type = genomic DNA
cttaacatgttccaaccagaagg

SEQ ID NO: 8125 - DNA, 23 bp, Homo sapiens
  source 1..23: mol_type = genomic DNA
cccgccttcctacaatgcaaggg

SEQ ID NO: 8126 - DNA, 23 bp, Homo sapiens
  source 1..23: mol_type = genomic DNA
agagtcgatggagagtcaagagg

SEQ ID NO: 8127 - DNA, 23 bp, Homo sapiens
  source 1..23: mol_type = genomic DNA
cttttttgtaataactcaagggg

SEQ ID NO: 8128 - DNA, 23 bp, Homo sapiens
  source 1..23: mol_type = genomic DNA
gaaaaagtcacactgaaaccagg

SEQ ID NO: 8129 - DNA, 23 bp, Homo sapiens
  source 1..23: mol_type = genomic DNA
catatgagtgtatacactgaggg

SEQ ID NO: 8130 - DNA, 23 bp, Homo sapiens
  source 1..23: mol_type = genomic DNA
gaataccagaaagacagcaatgg

SEQ ID NO: 8131 - DNA, 23 bp, Homo sapiens
  source 1..23: mol_type = genomic DNA
atggactacggtcattctagagg

SEQ ID NO: 8132 - DNA, 23 bp, Homo sapiens
  source 1..23: mol_type = genomic DNA
atattgcctcaatatttcaaggg

SEQ ID NO: 8133 - DNA, 23 bp, Homo sapiens
  source 1..23: mol_type = genomic DNA
acttgaatagtgatcaccatagg

SEQ ID NO: 8134 - DNA, 23 bp, Homo sapiens
  source 1..23: mol_type = genomic DNA
atctgtagggaactagaggtggg

SEQ ID NO: 8135 - DNA, 23 bp, Homo sapiens
  source 1..23: mol_type = genomic DNA
attgttatatacagcaatggagg

SEQ ID NO: 8136 - DNA, 23 bp, Homo sapiens
  source 1..23: mol_type = genomic DNA
gctgatggcatcgaatgcattgg

SEQ ID NO: 8137 - DNA, 23 bp, Homo sapiens
  source 1..23: mol_type = genomic DNA
tatatatgtacttagaacaaagg

SEQ ID NO: 8138 - DNA, 23 bp, Homo sapiens
  source 1..23: mol_type = genomic DNA
gtaagaacaaagaaatcactagg

SEQ ID NO: 8139 - DNA, 23 bp, Homo sapiens
  source 1..23: mol_type = genomic DNA
cgaaagttcttaaagtctagggg

SEQ ID NO: 8140 - DNA, 23 bp, Homo sapiens
  source 1..23: mol_type = genomic DNA
gcacataagtgtcacagagtagg

SEQ ID NO: 8141 - DNA, 23 bp, Homo sapiens
  source 1..23: mol_type = genomic DNA
acaatgctttccaaatcaccagg

SEQ ID NO: 8142 - DNA, 23 bp, Homo sapiens
  source 1..23: mol_type = genomic DNA
tgaataatgcagagatgcgaagg

SEQ ID NO: 8143 - DNA, 23 bp, Homo sapiens
  source 1..23: mol_type = genomic DNA
acagtgctgcaaatgaattgagg

SEQ ID NO: 8144 - DNA, 23 bp, Homo sapiens
  source 1..23: mol_type = genomic DNA
gcagtttatgcatcctacaatgg

SEQ ID NO: 8145 - DNA, 23 bp, Homo sapiens
  source 1..23: mol_type = genomic DNA
agacaaagcaaggttttgtgagg

SEQ ID NO: 8146 - DNA, 23 bp, Homo sapiens
  source 1..23: mol_type = genomic DNA
atacagttagcttattctggagg

SEQ ID NO: 8147 - DNA, 23 bp, Homo sapiens
  source 1..23: mol_type = genomic DNA
taaactactaagtttgcaggagg

SEQ ID NO: 8148 - DNA, 23 bp, Homo sapiens
  source 1..23: mol_type = genomic DNA
atgcagatgatctagaaatgagg

SEQ ID NO: 8149 - DNA, 23 bp, Homo sapiens
  source 1..23: mol_type = genomic DNA
acaatatgtggacagtctgaggg

SEQ ID NO: 8150 - DNA, 23 bp, Homo sapiens
  source 1..23: mol_type = genomic DNA
tgttagcaagaaacaccataggg

SEQ ID NO: 8151 - DNA, 23 bp, Homo sapiens
  source 1..23: mol_type = genomic DNA
ccaatgagaatcaattggagggg

SEQ ID NO: 8152 - DNA, 23 bp, Homo sapiens
  source 1..23: mol_type = genomic DNA
gacttttattactttccttgagg

SEQ ID NO: 8153 - DNA, 23 bp, Homo sapiens
  source 1..23: mol_type = genomic DNA
ttcctaagagaattagaccaagg

SEQ ID NO: 8154 - DNA, 23 bp, Homo sapiens
  source 1..23: mol_type = genomic DNA
atataaggggcgtagcctgaggg

SEQ ID NO: 8155 - DNA, 23 bp, Homo sapiens
  source 1..23: mol_type = genomic DNA
agtctttatgatccatccagtgg

SEQ ID NO: 8156 - DNA, 23 bp, Homo sapiens
  source 1..23: mol_type = genomic DNA
attatctaagatcaacactcagg

SEQ ID NO: 8157 - DNA, 23 bp, Homo sapiens
  source 1..23: mol_type = genomic DNA
ctctgactgtgagagaatgaggg

SEQ ID NO: 8158 - DNA, 23 bp, Homo sapiens
  source 1..23: mol_type = genomic DNA
aatatgcagcaaatattactggg

SEQ ID NO: 8159 - DNA, 23 bp, Homo sapiens
  source 1..23: mol_type = genomic DNA
tcttacaaacaccctaaaagggg

SEQ ID NO: 8160 - DNA, 23 bp, Homo sapiens
  source 1..23: mol_type = genomic DNA
ttaacacagtatattaactgtgg

SEQ ID NO: 8161 - DNA, 23 bp, Homo sapiens
  source 1..23: mol_type = genomic DNA
gtaattggcaaacagaggatggg

SEQ ID NO: 8162 - DNA, 23 bp, Homo sapiens
  source 1..23: mol_type = genomic DNA
gctgcttcttcatgataggaggg

SEQ ID NO: 8163 - DNA, 23 bp, Homo sapiens
  source 1..23: mol_type = genomic DNA
cctttctcataaaatcaagaagg

SEQ ID NO: 8164 - DNA, 23 bp, Homo sapiens
  source 1..23: mol_type = genomic DNA
ctgaagccaagtaatagagacgg

SEQ ID NO: 8165 - DNA, 23 bp, Homo sapiens
  source 1..23: mol_type = genomic DNA
aattaagcctctgaagtctgtgg

SEQ ID NO: 8166 - DNA, 23 bp, Homo sapiens
  source 1..23: mol_type = genomic DNA
tactgcatctagcctacatgtgg

SEQ ID NO: 8167 - DNA, 23 bp, Homo sapiens
  source 1..23: mol_type = genomic DNA
aaaaacagttgattaaacaatgg

SEQ ID NO: 8168 - DNA, 23 bp, Homo sapiens
  source 1..23: mol_type = genomic DNA
ctaactcagagctattaggaggg

SEQ ID NO: 8169 - DNA, 23 bp, Homo sapiens
  source 1..23: mol_type = genomic DNA
gcttggacatgcaatagagtggg

SEQ ID NO: 8170 - DNA, 23 bp, Homo sapiens
  source 1..23: mol_type = genomic DNA
ttacatttagctgtaaacaaggg

SEQ ID NO: 8171 - DNA, 23 bp, Homo sapiens
  source 1..23: mol_type = genomic DNA
agtcttggtgatttcaacggagg

SEQ ID NO: 8172 - DNA, 23 bp, Homo sapiens
  source 1..23: mol_type = genomic DNA
tttatcatataaagaccttgagg

SEQ ID NO: 8173 - DNA, 23 bp, Homo sapiens
  source 1..23: mol_type = genomic DNA
agaatgaaaatactttaggtggg

SEQ ID NO: 8174 - DNA, 23 bp, Homo sapiens
  source 1..23: mol_type = genomic DNA
ttactattttaaatacatcaggg

SEQ ID NO: 8175 - DNA, 23 bp, Homo sapiens
  source 1..23: mol_type = genomic DNA
cattcgatgccatcagcacaggg

SEQ ID NO: 8176 - DNA, 23 bp, Homo sapiens
  source 1..23: mol_type = genomic DNA
tgagaaaaatgtttcatcagtgg

SEQ ID NO: 8177 - DNA, 23 bp, Homo sapiens
  source 1..23: mol_type = genomic DNA
aacgctaataaataagagagagg

SEQ ID NO: 8178 - DNA, 23 bp, Homo sapiens
  source 1..23: mol_type = genomic DNA
gcaactggtgtatgttaaggagg

SEQ ID NO: 8179 - DNA, 23 bp, Homo sapiens
  source 1..23: mol_type = genomic DNA
ttggcttagcaggtagcagaagg

SEQ ID NO: 8180 - DNA, 23 bp, Homo sapiens
  source 1..23: mol_type = genomic DNA
ggtttttgtgcaagccaagtggg

SEQ ID NO: 8181 - DNA, 23 bp, Homo sapiens
  source 1..23: mol_type = genomic DNA
gcgatgtcttcaaggaacatagg

SEQ ID NO: 8182 - DNA, 23 bp, Homo sapiens
  source 1..23: mol_type = genomic DNA
gttaaaaacgtatggcatgaggg

SEQ ID NO: 8183 - DNA, 23 bp, Homo sapiens
  source 1..23: mol_type = genomic DNA
cagggattaaaattaggcatggg

SEQ ID NO: 8184 - DNA, 23 bp, Homo sapiens
  source 1..23: mol_type = genomic DNA
gccaattcgaaacgtgctagagg

SEQ ID NO: 8185 - DNA, 23 bp, Homo sapiens
  source 1..23: mol_type = genomic DNA
aacacttcttatatatgcagagg

SEQ ID NO: 8186 - DNA, 23 bp, Homo sapiens
  source 1..23: mol_type = genomic DNA
gtaaagatagcactgatacatgg

SEQ ID NO: 8187 - DNA, 23 bp, Homo sapiens
  source 1..23: mol_type = genomic DNA
tctgaagttgacatattttgggg

SEQ ID NO: 8188 - DNA, 23 bp, Homo sapiens
  source 1..23: mol_type = genomic DNA
atggtagctgattccactagagg

SEQ ID NO: 8189 - DNA, 23 bp, Homo sapiens
  source 1..23: mol_type = genomic DNA
catataaagtacattccccaggg

SEQ ID NO: 8190 - DNA, 23 bp, Homo sapiens
  source 1..23: mol_type = genomic DNA
attacaaactctatggactacgg

SEQ ID NO: 8191 - DNA, 23 bp, Homo sapiens
  source 1..23: mol_type = genomic DNA
cgaacttcatcatatcaaagagg

SEQ ID NO: 8192 - DNA, 23 bp, Homo sapiens
  source 1..23: mol_type = genomic DNA
gagaaatcatgtttttgacaggg

SEQ ID NO: 8193 - DNA, 23 bp, Homo sapiens
  source 1..23: mol_type = genomic DNA
actgaaaaccaaatttgcaaagg

SEQ ID NO: 8194 - DNA, 23 bp, Homo sapiens
  source 1..23: mol_type = genomic DNA
ctttgcaagtaaactagccaagg

SEQ ID NO: 8195 - DNA, 23 bp, Homo sapiens
  source 1..23: mol_type = genomic DNA
tacaccaagcaaagatatagggg

SEQ ID NO: 8196 - DNA, 23 bp, Homo sapiens
  source 1..23: mol_type = genomic DNA
cttagtcatagtccactggatgg

SEQ ID NO: 8197 - DNA, 23 bp, Homo sapiens
  source 1..23: mol_type = genomic DNA
attcagcttcataagtcccaggg

SEQ ID NO: 8198 - DNA, 23 bp, Homo sapiens
  source 1..23: mol_type = genomic DNA
actttccttgaggcagagggtgg

SEQ ID NO: 8199 - DNA, 23 bp, Homo sapiens
  source 1..23: mol_type = genomic DNA
tcactatacttcagttctggtgg

SEQ ID NO: 8200 - DNA, 23 bp, Homo sapiens
  source 1..23: mol_type = genomic DNA
ttaattttgtccatataacaagg

SEQ ID NO: 8201 - DNA, 23 bp, Homo sapiens
  source 1..23: mol_type = genomic DNA
aggggttagaacaacttccatgg

SEQ ID NO: 8202 - DNA, 23 bp, Homo sapiens
  source 1..23: mol_type = genomic DNA
aaacagaagtagggaaagagggg

SEQ ID NO: 8203 - DNA, 23 bp, Homo sapiens
  source 1..23: mol_type = genomic DNA
gcaatttctgaaggtcttagggg

SEQ ID NO: 8204 - DNA, 23 bp, Homo sapiens
  source 1..23: mol_type = genomic DNA
tcctgagaacatgctcaagaggg

SEQ ID NO: 8205 - DNA, 23 bp, Homo sapiens
  source 1..23: mol_type = genomic DNA
cataatagtgtcatatgtgaagg

SEQ ID NO: 8206 - DNA, 23 bp, Homo sapiens
  source 1..23: mol_type = genomic DNA
ttctcagcctctacactcagcgg

SEQ ID NO: 8207 - DNA, 23 bp, Homo sapiens
  source 1..23: mol_type = genomic DNA
acccttgcattgtaggaaggcgg

SEQ ID NO: 8208 - DNA, 23 bp, Homo sapiens
  source 1..23: mol_type = genomic DNA
gatcgatctatctatctgtaggg

SEQ ID NO: 8209 - DNA, 23 bp, Homo sapiens
  source 1..23: mol_type = genomic DNA
ctgaatagttgatggccacaggg

SEQ ID NO: 8210 - DNA, 23 bp, Homo sapiens
  source 1..23: mol_type = genomic DNA
cagcaagcaaagacaaagcaagg

SEQ ID NO: 8211 - DNA, 23 bp, Homo sapiens
  source 1..23: mol_type = genomic DNA
tctaagatcaacactcaggaagg

SEQ ID NO: 8212 - DNA, 23 bp, Homo sapiens
  source 1..23: mol_type = genomic DNA
ttaaaattccaaatagaacaagg

SEQ ID NO: 8213 - DNA, 23 bp, Homo sapiens
  source 1..23: mol_type = genomic DNA
ctatcaaagtcagcattaagggg

SEQ ID NO: 8214 - DNA, 23 bp, Homo sapiens
  source 1..23: mol_type = genomic DNA
gtagagcaggtacagcctgtagg

SEQ ID NO: 8215 - DNA, 23 bp, Homo sapiens
  source 1..23: mol_type = genomic DNA
agagtttccaagatctgctgagg

SEQ ID NO: 8216 - DNA, 23 bp, Homo sapiens
  source 1..23: mol_type = genomic DNA
agcttggacatgcaatagagtgg

SEQ ID NO: 8217 - DNA, 23 bp, Homo sapiens
  source 1..23: mol_type = genomic DNA
tcatgaatctctgtcagccaagg

SEQ ID NO: 8218 - DNA, 23 bp, Homo sapiens
  source 1..23: mol_type = genomic DNA
ttattgccaaagttgtaaggagg

SEQ ID NO: 8219 - DNA, 23 bp, Homo sapiens
  source 1..23: mol_type = genomic DNA
acttttttgtaataactcaaggg

SEQ ID NO: 8220 - DNA, 23 bp, Homo sapiens
  source 1..23: mol_type = genomic DNA
attgaatacagattgaagccagg

SEQ ID NO: 8221 - DNA, 23 bp, Homo sapiens
  source 1..23: mol_type = genomic DNA
gagaaaggcttcctctggagagg

SEQ ID NO: 8222 - DNA, 23 bp, Homo sapiens
  source 1..23: mol_type = genomic DNA
ttgatgatacactctgtggtagg

SEQ ID NO: 8223 - DNA, 23 bp, Homo sapiens
  source 1..23: mol_type = genomic DNA
ttgacactttcaactcagcatgg

SEQ ID NO: 8224 - DNA, 23 bp, Homo sapiens
  source 1..23: mol_type = genomic DNA
ttggtcacagaaatttctaaggg

SEQ ID NO: 8225 - DNA, 23 bp, Homo sapiens
  source 1..23: mol_type = genomic DNA
cttcttaactggagcatcggagg

SEQ ID NO: 8226 - DNA, 23 bp, Homo sapiens
  source 1..23: mol_type = genomic DNA
acatgattagttatcaggatggg

SEQ ID NO: 8227 - DNA, 23 bp, Homo sapiens
  source 1..23: mol_type = genomic DNA
agagacagtgaaccaagcatggg

SEQ ID NO: 8228 - DNA, 23 bp, Homo sapiens
  source 1..23: mol_type = genomic DNA
acttcaaaggaactcaagacagg

SEQ ID NO: 8229 - DNA, 23 bp, Homo sapiens
  source 1..23: mol_type = genomic DNA
ctatcacatagagtgttagaggg

SEQ ID NO: 8230 - DNA, 23 bp, Homo sapiens
  source 1..23: mol_type = genomic DNA
acttcaacaaaacagaagtaggg

SEQ ID NO: 8231 - DNA, 23 bp, Homo sapiens
  source 1..23: mol_type = genomic DNA
aattctcctaaatcaatggaagg

SEQ ID NO: 8232 - DNA, 23 bp, Homo sapiens
  source 1..23: mol_type = genomic DNA
caatgagaatcaattggaggggg

SEQ ID NO: 8233 - DNA, 23 bp, Homo sapiens
  source 1..23: mol_type = genomic DNA
tttgtaaaggacaagaatagggg

SEQ ID NO: 8234 - DNA, 23 bp, Homo sapiens
  source 1..23: mol_type = genomic DNA
agatgactttgattgatagaggg

SEQ ID NO: 8235 - DNA, 23 bp, Homo sapiens
  source 1..23: mol_type = genomic DNA
ataaaagtcctctatcctgttgg

SEQ ID NO: 8236 - DNA, 23 bp, Homo sapiens
  source 1..23: mol_type = genomic DNA
ttataagccacaggcagagaggg

SEQ ID NO: 8237 - DNA, 23 bp, Homo sapiens
  source 1..23: mol_type = genomic DNA
atttagcctttatttccagaagg

SEQ ID NO: 8238 - DNA, 23 bp, Homo sapiens
  source 1..23: mol_type = genomic DNA
ggatttgctacacataaaagagg

SEQ ID NO: 8239 - DNA, 23 bp, Homo sapiens
  source 1..23: mol_type = genomic DNA
gcaagtaaactagccaaggatgg

SEQ ID NO: 8240 - DNA, 23 bp, Homo sapiens
  source 1..23: mol_type = genomic DNA
atacatcaattttcaaatagcgg

SEQ ID NO: 8241 - DNA, 23 bp, Homo sapiens
  source 1..23: mol_type = genomic DNA
atatagatgacagtttatgttgg

SEQ ID NO: 8242 - DNA, 23 bp, Homo sapiens
  source 1..23: mol_type = genomic DNA
acaaaaccctgtttgttaggggg

SEQ ID NO: 8243 - DNA, 23 bp, Homo sapiens
  source 1..23: mol_type = genomic DNA
agttttatcagagagcaagatgg

SEQ ID NO: 8244 - DNA, 23 bp, Homo sapiens
  source 1..23: mol_type = genomic DNA
gtcttggtgatttcaacggaggg

SEQ ID NO: 8245 - DNA, 23 bp, Homo sapiens
  source 1..23: mol_type = genomic DNA
tataacgtgaacgccttgagagg

SEQ ID NO: 8246 - DNA, 23 bp, Homo sapiens
  source 1..23: mol_type = genomic DNA
caacaagaaagttaaggcaaagg

SEQ ID NO: 8247 - DNA, 23 bp, Homo sapiens
  source 1..23: mol_type = genomic DNA
ctaacccttgcattgtaggaagg

SEQ ID NO: 8248 - DNA, 23 bp, Homo sapiens
  source 1..23: mol_type = genomic DNA
acgttatccacagacttcagagg

SEQ ID NO: 8249 - DNA, 23 bp, Homo sapiens
  source 1..23: mol_type = genomic DNA
gttttgaacagaaaaccctcagg

SEQ ID NO: 8250 - DNA, 23 bp, Homo sapiens
  source 1..23: mol_type = genomic DNA
gttcagtgatgaaagtaaggagg

SEQ ID NO: 8251 - DNA, 23 bp, Homo sapiens
  source 1..23: mol_type = genomic DNA
tatttgtttaaaaattaagacgg

SEQ ID NO: 8252 - DNA, 23 bp, Homo sapiens
  source 1..23: mol_type = genomic DNA
agtgatagaatcgcattgcaggg

SEQ ID NO: 8253 - DNA, 23 bp, Homo sapiens
  source 1..23: mol_type = genomic DNA
tgctaagtaaaaagttagaaggg

SEQ ID NO: 8254 - DNA, 23 bp, Homo sapiens
  source 1..23: mol_type = genomic DNA
tccagcaatcctgtgttgggagg

SEQ ID NO: 8255 - DNA, 23 bp, Homo sapiens
  source 1..23: mol_type = genomic DNA
aattacatcttctcaaccagtgg

SEQ ID NO: 8256 - DNA, 23 bp, Homo sapiens
  source 1..23: mol_type = genomic DNA
gtcaaattttctcttcacaaagg

SEQ ID NO: 8257 - DNA, 23 bp, Homo sapiens
  source 1..23: mol_type = genomic DNA
ttattcagtaggcaagagaaggg

SEQ ID NO: 8258 - DNA, 23 bp, Homo sapiens
  source 1..23: mol_type = genomic DNA
gggcagtgagatttcagagatgg

SEQ ID NO: 8259 - DNA, 23 bp, Homo sapiens
  source 1..23: mol_type = genomic DNA
ttatgctcttatgtataagaggg

SEQ ID NO: 8260 - DNA, 23 bp, Homo sapiens
  source 1..23: mol_type = genomic DNA
ggaggaaaatacagagactacgg

SEQ ID NO: 8261 - DNA, 23 bp, Homo sapiens
  source 1..23: mol_type = genomic DNA
cttggtttaaagaggccagtagg

SEQ ID NO: 8262 - DNA, 23 bp, Homo sapiens
  source 1..23: mol_type = genomic DNA
tttccttagaatcttttactcgg

SEQ ID NO: 8263 - DNA, 23 bp, Homo sapiens
  source 1..23: mol_type = genomic DNA
tttaataagaacaatttcagtgg

SEQ ID NO: 8264 - DNA, 23 bp, Homo sapiens
  source 1..23: mol_type = genomic DNA
ataagggagagaaatccctatgg

SEQ ID NO: 8265 - DNA, 23 bp, Homo sapiens
  source 1..23: mol_type = genomic DNA
caggcaaccagaaaataagaagg

SEQ ID NO: 8266 - DNA, 23 bp, Homo sapiens
  source 1..23: mol_type = genomic DNA
gcgtgggaatgaaatgtgctagg

SEQ ID NO: 8267 - DNA, 23 bp, Homo sapiens
  source 1..23: mol_type = genomic DNA
agaatttcattgccattttgggg

SEQ ID NO: 8268 - DNA, 23 bp, Homo sapiens
  source 1..23: mol_type = genomic DNA
gcgttcacgttataagccacagg

SEQ ID NO: 8269 - DNA, 23 bp, Homo sapiens
  source 1..23: mol_type = genomic DNA
gccctgacctgcttaaacaccgg

SEQ ID NO: 8270 - DNA, 23 bp, Homo sapiens
  source 1..23: mol_type = genomic DNA
ataaccctatgcttaagagatgg

SEQ ID NO: 8271 - DNA, 23 bp, Homo sapiens
  source 1..23: mol_type = genomic DNA
gtacacattttttagccgatagg

SEQ ID NO: 8272 - DNA, 23 bp, Homo sapiens
  source 1..23: mol_type = genomic DNA
acatcgctcattaaaaaaggtgg

SEQ ID NO: 8273 - DNA, 23 bp, Homo sapiens
  source 1..23: mol_type = genomic DNA
atcaaagtcatctttagcatagg

SEQ ID NO: 8274 - DNA, 23 bp, Homo sapiens
  source 1..23: mol_type = genomic DNA
ccttataaatgttacagcgtggg

SEQ ID NO: 8275 - DNA, 23 bp, Homo sapiens
  source 1..23: mol_type = genomic DNA
tgctccttaatcttaggaggtgg

SEQ ID NO: 8276 - DNA, 23 bp, Homo sapiens
  source 1..23: mol_type = genomic DNA
tagttatgaggatgagactaggg

SEQ ID NO: 8277 - DNA, 23 bp, Homo sapiens
  source 1..23: mol_type = genomic DNA
aatgtgctatataaaatatgtgg

SEQ ID NO: 8278 - DNA, 23 bp, Homo sapiens
  source 1..23: mol_type = genomic DNA
gtggaaggagagttgatgggggg

SEQ ID NO: 8279 - DNA, 23 bp, Homo sapiens
  source 1..23: mol_type = genomic DNA
ccttgcattgtaggaaggcgggg

SEQ ID NO: 8280 - DNA, 23 bp, Homo sapiens
  source 1..23: mol_type = genomic DNA
taagaaggtaaaatacaggcagg

SEQ ID NO: 8281 - DNA, 23 bp, Homo sapiens
  source 1..23: mol_type = genomic DNA
gatacttttaatctaaggagtgg

SEQ ID NO: 8282 - DNA, 23 bp, Homo sapiens
  source 1..23: mol_type = genomic DNA
ccacaaagttgataggcataggg

SEQ ID NO: 8283 - DNA, 23 bp, Homo sapiens
  source 1..23: mol_type = genomic DNA
agtagaagtagaagaatccacgg

SEQ ID NO: 8284 - DNA, 23 bp, Homo sapiens
  source 1..23: mol_type = genomic DNA
ggcattgaagagaattaagtagg

SEQ ID NO: 8285 - DNA, 23 bp, Homo sapiens
  source 1..23: mol_type = genomic DNA
aatacaatattaatttggtgtgg

SEQ ID NO: 8286 - DNA, 23 bp, Homo sapiens
  source 1..23: mol_type = genomic DNA
ccattcttctagttttatggagg

SEQ ID NO: 8287 - DNA, 23 bp, Homo sapiens
  source 1..23: mol_type = genomic DNA
ccttcattaaggcatcgctcagg

SEQ ID NO: 8288 - DNA, 23 bp, Homo sapiens
  source 1..23: mol_type = genomic DNA
gcaggtgatatcgctaaagatgg

SEQ ID NO: 8289 - DNA, 23 bp, Homo sapiens
  source 1..23: mol_type = genomic DNA
cctgagcgatgccttaatgaagg

SEQ ID NO: 8290 - DNA, 23 bp, Homo sapiens
  source 1..23: mol_type = genomic DNA
ggaggatgcaggtaggggaaggg

SEQ ID NO: 8291 - DNA, 23 bp, Homo sapiens
  source 1..23: mol_type = genomic DNA
gagctcattgatgtcatccaagg

SEQ ID NO: 8292 - DNA, 23 bp, Homo sapiens
  source 1..23: mol_type = genomic DNA
tggtgagaacttttaagcgaagg

SEQ ID NO: 8293 - DNA, 23 bp, Homo sapiens
  source 1..23: mol_type = genomic DNA
ctctgtcagccaaggaatgtcgg

SEQ ID NO: 8294 - DNA, 23 bp, Homo sapiens
  source 1..23: mol_type = genomic DNA
accagtatcctgatatatgttgg

SEQ ID NO: 8295 - DNA, 23 bp, Homo sapiens
  source 1..23: mol_type = genomic DNA
acagcaatggaggtagggcaggg

SEQ ID NO: 8296 - DNA, 23 bp, Homo sapiens
  source 1..23: mol_type = genomic DNA
cttcattataacatgtcccaagg

SEQ ID NO: 8297 - DNA, 23 bp, Homo sapiens
  source 1..23: mol_type = genomic DNA
ttcctttaatgccattgcagagg

SEQ ID NO: 8298 - DNA, 23 bp, Homo sapiens
  source 1..23: mol_type = genomic DNA
ccaaatttctgaaagatccaagg

SEQ ID NO: 8299 - DNA, 23 bp, Homo sapiens
  source 1..23: mol_type = genomic DNA
agcaatcaggacttatgcatggg

SEQ ID NO: 8300 - DNA, 23 bp, Homo sapiens
  source 1..23: mol_type = genomic DNA
tatcatataaagaccttgagggg

SEQ ID NO: 8301 - DNA, 23 bp, Homo sapiens
  source 1..23: mol_type = genomic DNA
aagtacaatcaaatttgaagagg

SEQ ID NO: 8302 - DNA, 23 bp, Homo sapiens
  source 1..23: mol_type = genomic DNA
ttaaaatatactaagcatgtagg

SEQ ID NO: 8303 - DNA, 23 bp, Homo sapiens
  source 1..23: mol_type = genomic DNA
ctattacttggcttcagatgggg

SEQ ID NO: 8304 - DNA, 23 bp, Homo sapiens
  source 1..23: mol_type = genomic DNA
tatctgtagggaactagaggtgg

SEQ ID NO: 8305 - DNA, 23 bp, Homo sapiens
  source 1..23: mol_type = genomic DNA
gtaatgcattactcaatggcagg

SEQ ID NO: 8306 - DNA, 23 bp, Homo sapiens
  source 1..23: mol_type = genomic DNA
tattgccaaagttgtaaggaggg

SEQ ID NO: 8307 - DNA, 23 bp, Homo sapiens
  source 1..23: mol_type = genomic DNA
attaccatctctttcaggagtgg

SEQ ID NO: 8308 - DNA, 23 bp, Homo sapiens
  source 1..23: mol_type = genomic DNA
atatttacatacctctgcaatgg

SEQ ID NO: 8309 - DNA, 23 bp, Homo sapiens
  source 1..23: mol_type = genomic DNA
gtaagaaaacaaggaggtagggg

SEQ ID NO: 8310 - DNA, 23 bp, Homo sapiens
  source 1..23: mol_type = genomic DNA
gcagcctgagagatgtgcgcagg

SEQ ID NO: 8311 - DNA, 23 bp, Homo sapiens
  source 1..23: mol_type = genomic DNA
cagtatgccttctttaggaaggg

SEQ ID NO: 8312 - DNA, 23 bp, Homo sapiens
  source 1..23: mol_type = genomic DNA
tacgccccttatatttgagacgg

SEQ ID NO: 8313 - DNA, 23 bp, Homo sapiens
  source 1..23: mol_type = genomic DNA
tagtgtgttaggtttatcagtgg

SEQ ID NO: 8314 - DNA, 23 bp, Homo sapiens
  source 1..23: mol_type = genomic DNA
aagagggtaagtgcactgaaagg

SEQ ID NO: 8315 - DNA, 23 bp, Homo sapiens
  source 1..23: mol_type = genomic DNA
taagggagagaaatccctatggg

SEQ ID NO: 8316 - DNA, 23 bp, Homo sapiens
  source 1..23: mol_type = genomic DNA
atatctggtagcagaattggagg

SEQ ID NO: 8317 - DNA, 23 bp, Homo sapiens
  source 1..23: mol_type = genomic DNA
cagaaggcgcagagttcgaatgg

SEQ ID NO: 8318 - DNA, 23 bp, Homo sapiens
  source 1..23: mol_type = genomic DNA
ttaccatgataacccaattgtgg

SEQ ID NO: 8319 - DNA, 23 bp, Homo sapiens
  source 1..23: mol_type = genomic DNA
cattactaattactgaaggatgg

SEQ ID NO: 8320 - DNA, 23 bp, Homo sapiens
  source 1..23: mol_type = genomic DNA
ctgagaaaatttgcagcacaggg

SEQ ID NO: 8321 - DNA, 23 bp, Homo sapiens
  source 1..23: mol_type = genomic DNA
tataacactggactaagcattgg

SEQ ID NO: 8322 - DNA, 23 bp, Homo sapiens
  source 1..23: mol_type = genomic DNA
cccaatgagaatcaattggaggg

SEQ ID NO: 8323 - DNA, 23 bp, Homo sapiens
  source 1..23: mol_type = genomic DNA
atgtgggtgactgtcccctatgg

SEQ ID NO: 8324 - DNA, 23 bp, Homo sapiens
  source 1..23: mol_type = genomic DNA
aattgagtctagagagtcgatgg

SEQ ID NO: 8325 - DNA, 23 bp, Homo sapiens
  source 1..23: mol_type = genomic DNA
aatgatagacctgatcctatcgg

SEQ ID NO: 8326 - DNA, 23 bp, Homo sapiens
  source 1..23: mol_type = genomic DNA
agagttcaaggtttgctcaaggg

SEQ ID NO: 8327 - DNA, 23 bp, Homo sapiens
  source 1..23: mol_type = genomic DNA
acgccccttatatttgagacggg

SEQ ID NO: 8328 - DNA, 23 bp, Homo sapiens
  source 1..23: mol_type = genomic DNA
aagcaaggttttgtgaggcaagg

SEQ ID NO: 8329 - DNA, 23 bp, Homo sapiens
  source 1..23: mol_type = genomic DNA
tatgtaacttcgaaaagtgtagg

SEQ ID NO: 8330 - DNA, 23 bp, Homo sapiens
  source 1..23: mol_type = genomic DNA
atctatctgtagggaactagagg

SEQ ID NO: 8331 - DNA, 23 bp, Homo sapiens
  source 1..23: mol_type = genomic DNA
gtatgctccttaatcttaggagg

SEQ ID NO: 8332 - DNA, 23 bp, Homo sapiens
  source 1..23: mol_type = genomic DNA
gcagggattaaaattaggcatgg

SEQ ID NO: 8333 - DNA, 23 bp, Homo sapiens
  source 1..23: mol_type = genomic DNA
tgtgctaccagaataggcattgg

SEQ ID NO: 8334 - DNA, 23 bp, Homo sapiens
  source 1..23: mol_type = genomic DNA
gagtcaatttttgcgaaccaagg

SEQ ID NO: 8335 - DNA, 23 bp, Homo sapiens
  source 1..23: mol_type = genomic DNA
tgatttattgatatttacacagg

SEQ ID NO: 8336 - DNA, 23 bp, Homo sapiens
  source 1..23: mol_type = genomic DNA
cagcaatcctgtgttgggagggg

SEQ ID NO: 8337 - DNA, 23 bp, Homo sapiens
  source 1..23: mol_type = genomic DNA
ggaaagtttaatcaattctgagg

SEQ ID NO: 8338 - DNA, 23 bp, Homo sapiens
  source 1..23: mol_type = genomic DNA
tgtcttcttaactggagcatcgg

SEQ ID NO: 8339 - DNA, 23 bp, Homo sapiens
  source 1..23: mol_type = genomic DNA
cttttcgaactcatacagaccgg

SEQ ID NO: 8340 - DNA, 23 bp, Homo sapiens
  source 1..23: mol_type = genomic DNA
tctgagggacaagttgtgccagg

SEQ ID NO: 8341 - DNA, 23 bp, Homo sapiens
  source 1..23: mol_type = genomic DNA
cggtttttgtgcaagccaagtgg

SEQ ID NO: 8342 - DNA, 23 bp, Homo sapiens
  source 1..23: mol_type = genomic DNA
ggagaaaggtaaaaaaatcaggg

SEQ ID NO: 8343 - DNA, 23 bp, Homo sapiens
  source 1..23: mol_type = genomic DNA
cagtggcccttgaaatattgagg

SEQ ID NO: 8344 - DNA, 23 bp, Homo sapiens
  source 1..23: mol_type = genomic DNA
ctacccattagttcccccatagg

SEQ ID NO: 8345 - DNA, 23 bp, Homo sapiens
  source 1..23: mol_type = genomic DNA
tcagtatatgagattgctgtagg

SEQ ID NO: 8346 - DNA, 23 bp, Homo sapiens
  source 1..23: mol_type = genomic DNA
gatgaatgggatccaagaatcgg

SEQ ID NO: 8347 - DNA, 23 bp, Homo sapiens
  source 1..23: mol_type = genomic DNA
atgtggtatatccttcataaggg

SEQ ID NO: 8348 - DNA, 23 bp, Homo sapiens
  source 1..23: mol_type = genomic DNA
ttaagtcttggtgatttcaacgg

SEQ ID NO: 8349 - DNA, 23 bp, Homo sapiens
  source 1..23: mol_type = genomic DNA
tgaaattaatgtgtgttcagtgg

SEQ ID NO: 8350 - DNA, 23 bp, Homo sapiens
  source 1..23: mol_type = genomic DNA
gccatcagagagtagaagaaagg

SEQ ID NO: 8351 - DNA, 23 bp, Homo sapiens
  source 1..23: mol_type = genomic DNA
tcccagaacaggtagtgaaaggg

SEQ ID NO: 8352 - DNA, 23 bp, Homo sapiens
  source 1..23: mol_type = genomic DNA
aagcaatcaggacttatgcatgg

SEQ ID NO: 8353 - DNA, 23 bp, Homo sapiens
  source 1..23: mol_type = genomic DNA
aaatggtattactaaagccatgg

SEQ ID NO: 8354 - DNA, 23 bp, Homo sapiens
  source 1..23: mol_type = genomic DNA
gcacatatccttgcatattgtgg

SEQ ID NO: 8355 - DNA, 23 bp, Homo sapiens
  source 1..23: mol_type = genomic DNA
ataactgagtcacacaactaagg

SEQ ID NO: 8356 - DNA, 23 bp, Homo sapiens
  source 1..23: mol_type = genomic DNA
ttgtacacttacaatatggcagg

SEQ ID NO: 8357 - DNA, 23 bp, Homo sapiens
  source 1..23: mol_type = genomic DNA
taaataaatcctttttgccaggg

SEQ ID NO: 8358 - DNA, 23 bp, Homo sapiens
  source 1..23: mol_type = genomic DNA
gcatgtggcagttacttgaatgg

SEQ ID NO: 8359 - DNA, 23 bp, Homo sapiens
  source 1..23: mol_type = genomic DNA
atttttctggatctacgtaaagg

SEQ ID NO: 8360 - DNA, 23 bp, Homo sapiens
  source 1..23: mol_type = genomic DNA
ttttacaaatttattaacacggg

SEQ ID NO: 8361 - DNA, 23 bp, Homo sapiens
  source 1..23: mol_type = genomic DNA
cagcacaaatcacaagagatggg

SEQ ID NO: 8362 - DNA, 23 bp, Homo sapiens
  source 1..23: mol_type = genomic DNA
aagtgaagtaatatttctatggg

SEQ ID NO: 8363 - DNA, 23 bp, Homo sapiens
  source 1..23: mol_type = genomic DNA
gtaacttaagtaaatgtaggagg

SEQ ID NO: 8364 - DNA, 23 bp, Homo sapiens
  source 1..23: mol_type = genomic DNA
attctaatcgatgggtcttgtgg

SEQ ID NO: 8365 - DNA, 23 bp, Homo sapiens
  source 1..23: mol_type = genomic DNA
aaactcttagatcatatgcctgg

SEQ ID NO: 8366 - DNA, 23 bp, Homo sapiens
  source 1..23: mol_type = genomic DNA
ctgtggccatcaactattcaggg

SEQ ID NO: 8367 - DNA, 23 bp, Homo sapiens
  source 1..23: mol_type = genomic DNA
aatccataattctaatcgatggg

SEQ ID NO: 8368 - DNA, 23 bp, Homo sapiens
  source 1..23: mol_type = genomic DNA
tctttgtctagcctatctactgg

SEQ ID NO: 8369 - DNA, 23 bp, Homo sapiens
  source 1..23: mol_type = genomic DNA
tcaaaacctaagcaaaccctggg

SEQ ID NO: 8370 - DNA, 23 bp, Homo sapiens
  source 1..23: mol_type = genomic DNA
tctcagcctctacactcagcggg

SEQ ID NO: 8371 - DNA, 23 bp, Homo sapiens
  source 1..23: mol_type = genomic DNA
gagggggagagattggagagagg

SEQ ID NO: 8372 - DNA, 23 bp, Homo sapiens
  source 1..23: mol_type = genomic DNA
tgaatgcctgttgtgtaagaagg

SEQ ID NO: 8373 - DNA, 23 bp, Homo sapiens
  source 1..23: mol_type = genomic DNA
atgagaggcatgacagtgaatgg

SEQ ID NO: 8374 - DNA, 23 bp, Homo sapiens
  source 1..23: mol_type = genomic DNA
aactaggtaaattttctccaagg

SEQ ID NO: 8375 - DNA, 23 bp, Homo sapiens
  source 1..23: mol_type = genomic DNA
atattgactgaattgactgtagg

SEQ ID NO: 8376 - DNA, 23 bp, Homo sapiens
  source 1..23: mol_type = genomic DNA
acaaaagcactctgagctaaggg

SEQ ID NO: 8377 - DNA, 23 bp, Homo sapiens
  source 1..23: mol_type = genomic DNA
taagaggcccttcctaaagaagg

SEQ ID NO: 8378 - DNA, 23 bp, Homo sapiens
  source 1..23: mol_type = genomic DNA
gtgtactgtgctgttaggcacgg

SEQ ID NO: 8379 - DNA, 23 bp, Homo sapiens
  source 1..23: mol_type = genomic DNA
ataggagtaatcatgcttcaggg

SEQ ID NO: 8380 - DNA, 23 bp, Homo sapiens
  source 1..23: mol_type = genomic DNA
tgaaattgttcttattaaagggg

SEQ ID NO: 8381 - DNA, 23 bp, Homo sapiens
  source 1..23: mol_type = genomic DNA
ctgtacctgctctacttcaaagg

SEQ ID NO: 8382 - DNA, 23 bp, Homo sapiens
  source 1..23: mol_type = genomic DNA
tgttgtgtagatgggagtgatgg

SEQ ID NO: 8383 - DNA, 23 bp, Homo sapiens
  source 1..23: mol_type = genomic DNA
attactttccttgaggcagaggg

SEQ ID NO: 8384 - DNA, 23 bp, Homo sapiens
  source 1..23: mol_type = genomic DNA
tatatgtataattatcttggtgg

SEQ ID NO: 8385 - DNA, 23 bp, Homo sapiens
  source 1..23: mol_type = genomic DNA
aaatccataattctaatcgatgg

SEQ ID NO: 8386 - DNA, 23 bp, Homo sapiens
  source 1..23: mol_type = genomic DNA
ggttccatacaatattgaaaggg

SEQ ID NO: 8387 - DNA, 23 bp, Homo sapiens
  source 1..23: mol_type = genomic DNA
ctttagcttatgaaactcatggg

SEQ ID NO: 8388 - DNA, 23 bp, Homo sapiens
  source 1..23: mol_type = genomic DNA
tatgtgatggtactttcctaagg

SEQ ID NO: 8389 - DNA, 23 bp, Homo sapiens
  source 1..23: mol_type = genomic DNA
ttgtctatttgacactgggtcgg

SEQ ID NO: 8390 - DNA, 23 bp, Homo sapiens
  source 1..23: mol_type = genomic DNA
tttttgttctgaggttgctgagg

SEQ ID NO: 8391 - DNA, 23 bp, Homo sapiens
  source 1..23: mol_type = genomic DNA
actaatgtatcacaatatgcagg

SEQ ID NO: 8392 - DNA, 23 bp, Homo sapiens
  source 1..23: mol_type = genomic DNA
acaagattccttcataaggatgg

SEQ ID NO: 8393 - DNA, 23 bp, Homo sapiens
  source 1..23: mol_type = genomic DNA
tcctggcttctaggatcaagtgg

SEQ ID NO: 8394 - DNA, 23 bp, Homo sapiens
  source 1..23: mol_type = genomic DNA
tgaagctatcattagaggaaagg

SEQ ID NO: 8395 - DNA, 23 bp, Homo sapiens
  source 1..23: mol_type = genomic DNA
tctattacgatgaggttgatggg

SEQ ID NO: 8396 - DNA, 23 bp, Homo sapiens
  source 1..23: mol_type = genomic DNA
agagggtaagtgcactgaaaggg

SEQ ID NO: 8397 - DNA, 23 bp, Homo sapiens
  source 1..23: mol_type = genomic DNA
tctaactcagagctattaggagg

SEQ ID NO: 8398 - DNA, 23 bp, Homo sapiens
  source 1..23: mol_type = genomic DNA
tgagaggtatgtataacaatggg

SEQ ID NO: 8399 - DNA, 23 bp, Homo sapiens
  source 1..23: mol_type = genomic DNA
tacccattagttcccccataggg

SEQ ID NO: 8400 - DNA, 23 bp, Homo sapiens
  source 1..23: mol_type = genomic DNA
ttgaagtagaaaattctgacagg

SEQ ID NO: 8401 - DNA, 23 bp, Homo sapiens
  source 1..23: mol_type = genomic DNA
atttacagaaacaaaccataggg

SEQ ID NO: 8402 - DNA, 23 bp, Homo sapiens
  source 1..23: mol_type = genomic DNA
acttctggttattactggcccgg

SEQ ID NO: 8403 - DNA, 23 bp, Homo sapiens
  source 1..23: mol_type = genomic DNA
gggagtttatggttgttgtaggg

SEQ ID NO: 8404 - DNA, 23 bp, Homo sapiens
  source 1..23: mol_type = genomic DNA
agtaaactgctttagacaagtgg

SEQ ID NO: 8405 - DNA, 23 bp, Homo sapiens
  source 1..23: mol_type = genomic DNA
agtaggcaagagaagggcattgg

SEQ ID NO: 8406 - DNA, 23 bp, Homo sapiens
  source 1..23: mol_type = genomic DNA
gcatgcacgtgttttccataggg

SEQ ID NO: 8407 - DNA, 23 bp, Homo sapiens
  source 1..23: mol_type = genomic DNA
aactcaagtaagattggaagtgg

SEQ ID NO: 8408 - DNA, 23 bp, Homo sapiens
  source 1..23: mol_type = genomic DNA
ccaagtatcattttgagttgggg

SEQ ID NO: 8409 - DNA, 23 bp, Homo sapiens
  source 1..23: mol_type = genomic DNA
taaactgtcatctatattggtgg

SEQ ID NO: 8410 - DNA, 23 bp, Homo sapiens
  source 1..23: mol_type = genomic DNA
atgtttgtatgaacagagacagg

SEQ ID NO: 8411 - DNA, 23 bp, Homo sapiens
  source 1..23: mol_type = genomic DNA
agctgcttcttcatgataggagg

SEQ ID NO: 8412 - DNA, 23 bp, Homo sapiens
  source 1..23: mol_type = genomic DNA
tcagaagagcacaagtaagttgg

SEQ ID NO: 8413 - DNA, 23 bp, Homo sapiens
  source 1..23: mol_type = genomic DNA
taaggtccaatgaaatatgatgg

SEQ ID NO: 8414 - DNA, 23 bp, Homo sapiens
  source 1..23: mol_type = genomic DNA
gtaccgagaattaagaatatggg

SEQ ID NO: 8415 - DNA, 23 bp, Homo sapiens
  source 1..23: mol_type = genomic DNA
tctgtcatggaaagatgccttgg

SEQ ID NO: 8416 - DNA, 23 bp, Homo sapiens
  source 1..23: mol_type = genomic DNA
ccttatttctcctcaaggcaagg

SEQ ID NO: 8417 - DNA, 23 bp, Homo sapiens
  source 1..23: mol_type = genomic DNA
gttgtgccaggagggggcaaagg

SEQ ID NO: 8418 - DNA, 23 bp, Homo sapiens
  source 1..23: mol_type = genomic DNA
cagataataacattgtgcctagg

SEQ ID NO: 8419 - DNA, 23 bp, Homo sapiens
  source 1..23: mol_type = genomic DNA
ggtatcatacgtacacatatggg

SEQ ID NO: 8420 - DNA, 23 bp, Homo sapiens
  source 1..23: mol_type = genomic DNA
aataactctgtactgtttggtgg

SEQ ID NO: 8421 - DNA, 23 bp, Homo sapiens
  source 1..23: mol_type = genomic DNA
ggatatccttttttgttctgagg

SEQ ID NO: 8422 - DNA, 23 bp, Homo sapiens
  source 1..23: mol_type = genomic DNA
aacctaaaggcatttatcaaggg

SEQ ID NO: 8423 - DNA, 23 bp, Homo sapiens
  source 1..23: mol_type = genomic DNA
ataagttgaaatgtaccaatggg

SEQ ID NO: 8424 - DNA, 23 bp, Homo sapiens
  source 1..23: mol_type = genomic DNA
atgagaggtatgtataacaatgg

SEQ ID NO: 8425 - DNA, 23 bp, Homo sapiens
  source 1..23: mol_type = genomic DNA
gccacttgatcctagaagccagg

SEQ ID NO: 8426 - DNA, 23 bp, Homo sapiens
  source 1..23: mol_type = genomic DNA
ttgtgaagagaaaatttgactgg

SEQ ID NO: 8427 - DNA, 23 bp, Homo sapiens
  source 1..23: mol_type = genomic DNA
gagaactaacaacaataaagagg

SEQ ID NO: 8428 - DNA, 23 bp, Homo sapiens
  source 1..23: mol_type = genomic DNA
gctttcagccaacaggatagagg

SEQ ID NO: 8429 - DNA, 23 bp, Homo sapiens
  source 1..23: mol_type = genomic DNA
tagtaactttgtgtaaaggtggg

SEQ ID NO: 8430 - DNA, 23 bp, Homo sapiens
  source 1..23: mol_type = genomic DNA
tgatcgatctatctatctgtagg

SEQ ID NO: 8431 - DNA, 23 bp, Homo sapiens
  source 1..23: mol_type = genomic DNA
tataactgtagaaatacaaaagg

SEQ ID NO: 8432 - DNA, 23 bp, Homo sapiens
  source 1..23: mol_type = genomic DNA
agggttagtgtaatatctaaagg

SEQ ID NO: 8433 - DNA, 23 bp, Homo sapiens
  source 1..23: mol_type = genomic DNA
tcagagagcaagatggcataggg

SEQ ID NO: 8434 - DNA, 23 bp, Homo sapiens
  source 1..23: mol_type = genomic DNA
accattttatttatctgcaccgg

SEQ ID NO: 8435 - DNA, 23 bp, Homo sapiens
  source 1..23: mol_type = genomic DNA
ttaataggatgcataatgtcagg

SEQ ID NO: 8436 - DNA, 23 bp, Homo sapiens
  source 1..23: mol_type = genomic DNA
ctgttactgaaagcataagatgg

SEQ ID NO: 8437 - DNA, 23 bp, Homo sapiens
  source 1..23: mol_type = genomic DNA
aatttgaatgaattattggatgg

SEQ ID NO: 8438 - DNA, 23 bp, Homo sapiens
  source 1..23: mol_type = genomic DNA
attttcttctcacagatgactgg

SEQ ID NO: 8439 - DNA, 23 bp, Homo sapiens
  source 1..23: mol_type = genomic DNA
aaaaaagctttgaatagtgtggg

SEQ ID NO: 8440 - DNA, 23 bp, Homo sapiens
  source 1..23: mol_type = genomic DNA
catattttaatttatggacgtgg

SEQ ID NO: 8441 - DNA, 23 bp, Homo sapiens
  source 1..23: mol_type = genomic DNA
attgaggaggatgcaggtagggg

SEQ ID NO: 8442 - DNA, 23 bp, Homo sapiens
  source 1..23: mol_type = genomic DNA
cattcagcttcataagtcccagg

SEQ ID NO: 8443 - DNA, 23 bp, Homo sapiens
  source 1..23: mol_type = genomic DNA
aaaaggctcaactataacactgg

SEQ ID NO: 8444 - DNA, 23 bp, Homo sapiens
  source 1..23: mol_type = genomic DNA
actacaactaggatgccaaatgg

SEQ ID NO: 8445 - DNA, 23 bp, Homo sapiens
  source 1..23: mol_type = genomic DNA
ggtgatttcaacggagggaatgg

SEQ ID NO: 8446 - DNA, 23 bp, Homo sapiens
  source 1..23: mol_type = genomic DNA
tggtccatcgactcgtactcagg

SEQ ID NO: 8447 - DNA, 23 bp, Homo sapiens
  source 1..23: mol_type = genomic DNA
tgagattgctgtaggtttcgtgg

SEQ ID NO: 8448 - DNA, 23 bp, Homo sapiens
  source 1..23: mol_type = genomic DNA
atgaaagtagaaaccattacggg

SEQ ID NO: 8449 - DNA, 23 bp, Homo sapiens
  source 1..23: mol_type = genomic DNA
tttttggcaatccttcctaaagg

SEQ ID NO: 8450 - DNA, 23 bp, Homo sapiens
  source 1..23: mol_type = genomic DNA
ttcttaatcacagagacaaatgg

SEQ ID NO: 8451 - DNA, 23 bp, Homo sapiens
  source 1..23: mol_type = genomic DNA
cctccataaaactagaagaatgg

SEQ ID NO: 8452 - DNA, 23 bp, Homo sapiens
  source 1..23: mol_type = genomic DNA
aataccagaaagacagcaatggg

SEQ ID NO: 8453 - DNA, 23 bp, Homo sapiens
  source 1..23: mol_type = genomic DNA
gtatcctgatatatgttggttgg

SEQ ID NO: 8454 - DNA, 23 bp, Homo sapiens
  source 1..23: mol_type = genomic DNA
acaaaaaaccagaaagagttggg

SEQ ID NO: 8455 - DNA, 23 bp, Homo sapiens
  source 1..23: mol_type = genomic DNA
gaggtgttgctgattagagtagg

SEQ ID NO: 8456 - DNA, 23 bp, Homo sapiens
  source 1..23: mol_type = genomic DNA
tttgtgtacacatagtgtaaagg

SEQ ID NO: 8457 - DNA, 23 bp, Homo sapiens
  source 1..23: mol_type = genomic DNA
aggcaaatttcttttttcgtcgg

SEQ ID NO: 8458 - DNA, 23 bp, Homo sapiens
  source 1..23: mol_type = genomic DNA
gagtgaacagcaatacttaaggg

SEQ ID NO: 8459 - DNA, 23 bp, Homo sapiens
  source 1..23: mol_type = genomic DNA
ataatacaaagcacgtaaaaggg

SEQ ID NO: 8460 - DNA, 23 bp, Homo sapiens
  source 1..23: mol_type = genomic DNA
gggttccatacaatattgaaagg

SEQ ID NO: 8461 - DNA, 23 bp, Homo sapiens
  source 1..23: mol_type = genomic DNA
ttgtttggatctccacatgtagg

SEQ ID NO: 8462 - DNA, 23 bp, Homo sapiens
  source 1..23: mol_type = genomic DNA
agttgttgagaatgattcctagg

SEQ ID NO: 8463 - DNA, 23 bp, Homo sapiens
  source 1..23: mol_type = genomic DNA
ataaatgtaaattacatgctagg

SEQ ID NO: 8464 - DNA, 23 bp, Homo sapiens
  source 1..23: mol_type = genomic DNA
ttttccagtttctataaaagtgg

SEQ ID NO: 8465 - DNA, 23 bp, Homo sapiens
  source 1..23: mol_type = genomic DNA
aggctcttaaaagtagatgtagg

SEQ ID NO: 8466 - DNA, 23 bp, Homo sapiens
  source 1..23: mol_type = genomic DNA
ctatcattagaggaaaggttggg

SEQ ID NO: 8467 - DNA, 23 bp, Homo sapiens
  source 1..23: mol_type = genomic DNA
ccaaaggttgaattttctctggg

SEQ ID NO: 8468 - DNA, 23 bp, Homo sapiens
  source 1..23: mol_type = genomic DNA
ttcacttagtcatagtccactgg

SEQ ID NO: 8469 - DNA, 23 bp, Homo sapiens
  source 1..23: mol_type = genomic DNA
agtatcactaatttgcttcgagg

SEQ ID NO: 8470 - DNA, 23 bp, Homo sapiens
  source 1..23: mol_type = genomic DNA
cctagaaatacaaattaagttgg

SEQ ID NO: 8471 - DNA, 23 bp, Homo sapiens
  source 1..23: mol_type = genomic DNA
ttcgtccatctcttaagcatagg

SEQ ID NO: 8472 - DNA, 23 bp, Homo sapiens
  source 1..23: mol_type = genomic DNA
atataaactagaatgatgtttgg

SEQ ID NO: 8473 - DNA, 23 bp, Homo sapiens
  source 1..23: mol_type = genomic DNA
ttaatgcaccattttttcacagg

SEQ ID NO: 8474 - DNA, 23 bp, Homo sapiens
  source 1..23: mol_type = genomic DNA
tttatatcttaactttgtagtgg

SEQ ID NO: 8475 - DNA, 23 bp, Homo sapiens
  source 1..23: mol_type = genomic DNA
ggaggagtaggagaggcggctgg

SEQ ID NO: 8476 - DNA, 23 bp, Homo sapiens
  source 1..23: mol_type = genomic DNA
agaagctgcttcttcatgatagg

SEQ ID NO: 8477 - DNA, 23 bp, Homo sapiens
  source 1..23: mol_type = genomic DNA
gtaactttatcggtcaaaatggg

SEQ ID NO: 8478 - DNA, 23 bp, Homo sapiens
  source 1..23: mol_type = genomic DNA
tctctgatggcacagtagcctgg

SEQ ID NO: 8479 - DNA, 23 bp, Homo sapiens
  source 1..23: mol_type = genomic DNA
tttaaatatctgttatgtgatgg

SEQ ID NO: 8480 - DNA, 23 bp, Homo sapiens
  source 1..23: mol_type = genomic DNA
tatatgatcttagagtgtattgg

SEQ ID NO: 8481 - DNA, 23 bp, Homo sapiens
  source 1..23: mol_type = genomic DNA
tctaaggttctctttgacaaagg

SEQ ID NO: 8482 - DNA, 23 bp, Homo sapiens
  source 1..23: mol_type = genomic DNA
ctgcaatgcgattctatcactgg

SEQ ID NO: 8483 - DNA, 23 bp, Homo sapiens
  source 1..23: mol_type = genomic DNA
tattttttaatcacacatgaagg

SEQ ID NO: 8484 - DNA, 23 bp, Homo sapiens
  source 1..23: mol_type = genomic DNA
gcatctttccatgacagagcagg

SEQ ID NO: 8485 - DNA, 23 bp, Homo sapiens
  source 1..23: mol_type = genomic DNA
gtgatatatgtgaaaggtaacgg

SEQ ID NO: 8486 - DNA, 23 bp, Homo sapiens
  source 1..23: mol_type = genomic DNA
aacgggataaaccaagcaactgg

SEQ ID NO: 8487 - DNA, 23 bp, Homo sapiens
  source 1..23: mol_type = genomic DNA
ttaaaatgtcttttattccaagg

SEQ ID NO: 8488 - DNA, 23 bp, Homo sapiens
  source 1..23: mol_type = genomic DNA
tctattacttggcttcagatggg

SEQ ID NO: 8489 - DNA, 23 bp, Homo sapiens
  source 1..23: mol_type = genomic DNA
tataaaagagtttaattgcatgg

SEQ ID NO: 8490 - DNA, 23 bp, Homo sapiens
  source 1..23: mol_type = genomic DNA
ttataaaagttgaatggcaaagg

SEQ ID NO: 8491 - DNA, 23 bp, Homo sapiens
  source 1..23: mol_type = genomic DNA
gatgaaagtaaggaggagatggg

SEQ ID NO: 8492 - DNA, 23 bp, Homo sapiens
  source 1..23: mol_type = genomic DNA
gtaaacaaaccgacattccttgg

SEQ ID NO: 8493 - DNA, 23 bp, Homo sapiens
  source 1..23: mol_type = genomic DNA
tgaggtgtgggaggaaaaatggg

SEQ ID NO: 8494 - DNA, 23 bp, Homo sapiens
  source 1..23: mol_type = genomic DNA
tattacatactgtcattcactgg

SEQ ID NO: 8495 - DNA, 23 bp, Homo sapiens
  source 1..23: mol_type = genomic DNA
cttaacatacaccagttgcttgg

SEQ ID NO: 8496 - DNA, 23 bp, Homo sapiens
  source 1..23: mol_type = genomic DNA
gggatttctctcccttatgaagg

SEQ ID NO: 8497 - DNA, 23 bp, Homo sapiens
  source 1..23: mol_type = genomic DNA
gtacagatcttcaaatatccagg

SEQ ID NO: 8498 - DNA, 23 bp, Homo sapiens
  source 1..23: mol_type = genomic DNA
acagaaggaatcttaatgtcagg

SEQ ID NO: 8499 - DNA, 23 bp, Homo sapiens
  source 1..23: mol_type = genomic DNA
acgagtcgatggaccattgtagg

SEQ ID NO: 8500 - DNA, 23 bp, Homo sapiens
  source 1..23: mol_type = genomic DNA
cttattactagcgtgatgaatgg

SEQ ID NO: 8501 - DNA, 23 bp, Homo sapiens
  source 1..23: mol_type = genomic DNA
ttaaaacaggttttcaaagaggg

SEQ ID NO: 8502 - DNA, 23 bp, Homo sapiens
  source 1..23: mol_type = genomic DNA
aagatgccagtatcatcaactgg

SEQ ID NO: 8503 - DNA, 23 bp, Homo sapiens
  source 1..23: mol_type = genomic DNA
gtaatttgttcagtcacatcagg

SEQ ID NO: 8504 - DNA, 23 bp, Homo sapiens
  source 1..23: mol_type = genomic DNA
atgcatgtactttcaggcctagg

SEQ ID NO: 8505 - DNA, 23 bp, Homo sapiens
  source 1..23: mol_type = genomic DNA
gtacctcaacaagaaagttaagg

SEQ ID NO: 8506 - DNA, 23 bp, Homo sapiens
  source 1..23: mol_type = genomic DNA
ctacaactaggatgccaaatggg

SEQ ID NO: 8507 - DNA, 23 bp, Homo sapiens
  source 1..23: mol_type = genomic DNA
gcacatttaacaaactcttaggg

SEQ ID NO: 8508 - DNA, 23 bp, Homo sapiens
  source 1..23: mol_type = genomic DNA
tgactgttcgtttcgtgtgtagg

SEQ ID NO: 8509 - DNA, 23 bp, Homo sapiens
  source 1..23: mol_type = genomic DNA
tataaaagttgaatggcaaaggg

SEQ ID NO: 8510 - DNA, 23 bp, Homo sapiens
  source 1..23: mol_type = genomic DNA
agttgagccattcccagaacagg

SEQ ID NO: 8511 - DNA, 23 bp, Homo sapiens
  source 1..23: mol_type = genomic DNA
tgtactgtgctgttaggcacggg

SEQ ID NO: 8512 - DNA, 23 bp, Homo sapiens
  source 1..23: mol_type = genomic DNA
tcgtccatctcttaagcataggg

SEQ ID NO: 8513 - DNA, 23 bp, Homo sapiens
  source 1..23: mol_type = genomic DNA
tctaatttgtgttaattactggg

SEQ ID NO: 8514 - DNA, 23 bp, Homo sapiens
  source 1..23: mol_type = genomic DNA
ggattgttatttaaatttggtgg

SEQ ID NO: 8515 - DNA, 23 bp, Homo sapiens
  source 1..23: mol_type = genomic DNA
acattccccagggtttgcttagg

SEQ ID NO: 8516 - DNA, 23 bp, Homo sapiens
  source 1..23: mol_type = genomic DNA
agtcacatcaggatgtataaagg

SEQ ID NO: 8517 - DNA, 23 bp, Homo sapiens
  source 1..23: mol_type = genomic DNA
ttaaatgagttaaaaacgtatgg

SEQ ID NO: 8518 - DNA, 23 bp, Homo sapiens
  source 1..23: mol_type = genomic DNA
ggtctgagtttctctctgcttgg

SEQ ID NO: 8519 - DNA, 23 bp, Homo sapiens
  source 1..23: mol_type = genomic DNA
ttaggtgtctctgggaactctgg

SEQ ID NO: 8520 - DNA, 23 bp, Homo sapiens
  source 1..23: mol_type = genomic DNA
gagttcttatggcagcagtcagg

SEQ ID NO: 8521 - DNA, 23 bp, Homo sapiens
  source 1..23: mol_type = genomic DNA
tcaaagatatactcaaagattgg

SEQ ID NO: 8522 - DNA, 23 bp, Homo sapiens
  source 1..23: mol_type = genomic DNA
gtctcagtatactgtgaaaaggg

SEQ ID NO: 8523 - DNA, 23 bp, Homo sapiens
  source 1..23: mol_type = genomic DNA
tttatagtaactttgtgtaaagg

SEQ ID NO: 8524 - DNA, 23 bp, Homo sapiens
  source 1..23: mol_type = genomic DNA
ggaggtcgattagaaaaatctgg

SEQ ID NO: 8525 - DNA, 23 bp, Homo sapiens
  source 1..23: mol_type = genomic DNA
tcaatggtttggaagctactagg

SEQ ID NO: 8526 - DNA, 23 bp, Homo sapiens
  source 1..23: mol_type = genomic DNA
ggacaagttgtgccaggaggggg

SEQ ID NO: 8527 - DNA, 23 bp, Homo sapiens
  source 1..23: mol_type = genomic DNA
ttctcaggatttttgaagcccgg

SEQ ID NO: 8528 - DNA, 23 bp, Homo sapiens
  source 1..23: mol_type = genomic DNA
ttatggttgttgtagggcagtgg

SEQ ID NO: 8529 - DNA, 23 bp, Homo sapiens
  source 1..23: mol_type = genomic DNA
gatttcagagatggctagcttgg

SEQ ID NO: 8530 - DNA, 23 bp, Homo sapiens
  source 1..23: mol_type = genomic DNA
tgataattctaaataagaatagg

SEQ ID NO: 8531 - DNA, 23 bp, Homo sapiens
  source 1..23: mol_type = genomic DNA
gtatgatacgactgttaacctgg

SEQ ID NO: 8532 - DNA, 23 bp, Homo sapiens
  source 1..23: mol_type = genomic DNA
attctgtgtctttcattacctgg

SEQ ID NO: 8533 - DNA, 23 bp, Homo sapiens
  source 1..23: mol_type = genomic DNA
gttggtgctggcagcttagtggg

SEQ ID NO: 8534 - DNA, 23 bp, Homo sapiens
  source 1..23: mol_type = genomic DNA
gagaaacaataaaccaatgatgg

SEQ ID NO: 8535 - DNA, 23 bp, Homo sapiens
  source 1..23: mol_type = genomic DNA
gttaacttgctaaaattcatggg

SEQ ID NO: 8536 - DNA, 23 bp, Homo sapiens
  source 1..23: mol_type = genomic DNA
tcagttggatttctttcaaaggg

SEQ ID NO: 8537 - DNA, 23 bp, Homo sapiens
  source 1..23: mol_type = genomic DNA
atttttagaataatgatatgagg

SEQ ID NO: 8538 - DNA, 23 bp, Homo sapiens
  source 1..23: mol_type = genomic DNA
ttctcagtcaagcagaactctgg

SEQ ID NO: 8539 - DNA, 23 bp, Homo sapiens
  source 1..23: mol_type = genomic DNA
atccctatgggggaactaatggg

SEQ ID NO: 8540 - DNA, 23 bp, Homo sapiens
  source 1..23: mol_type = genomic DNA
aataattcagaggacaaaacagg

SEQ ID NO: 8541 - DNA, 23 bp, Homo sapiens
  source 1..23: mol_type = genomic DNA
cttgccttgaggagaaataaggg

SEQ ID NO: 8542 - DNA, 23 bp, Homo sapiens
  source 1..23: mol_type = genomic DNA
tctcagtccacaaagttgatagg

SEQ ID NO: 8543 - DNA, 23 bp, Homo sapiens
  source 1..23: mol_type = genomic DNA
ctattcgaagttatacatatggg

SEQ ID NO: 8544 - DNA, 23 bp, Homo sapiens
  source 1..23: mol_type = genomic DNA
tcaacaatttattcataaagtgg

SEQ ID NO: 8545 - DNA, 23 bp, Homo sapiens
  source 1..23: mol_type = genomic DNA
cgatgggtcttgtggaatagtgg

SEQ ID NO: 8546 - DNA, 23 bp, Homo sapiens
  source 1..23: mol_type = genomic DNA
gtaagatatccataatcaattgg

SEQ ID NO: 8547 - DNA, 23 bp, Homo sapiens
  source 1..23: mol_type = genomic DNA
actaccccgtctctattacttgg

SEQ ID NO: 8548 - DNA, 23 bp, Homo sapiens
  source 1..23: mol_type = genomic DNA
ctttaagacacagtagagatagg

SEQ ID NO: 8549 - DNA, 23 bp, Homo sapiens
  source 1..23: mol_type = genomic DNA
gttatgctcttatgtataagagg

SEQ ID NO: 8550 - DNA, 23 bp, Homo sapiens
  source 1..23: mol_type = genomic DNA
tatgttgtcagaaacatctaagg

SEQ ID NO: 8551 - DNA, 23 bp, Homo sapiens
  source 1..23: mol_type = genomic DNA
ccccaactcaaaatgatacttgg

SEQ ID NO: 8552 - DNA, 23 bp, Homo sapiens
  source 1..23: mol_type = genomic DNA
ataccattctttgaaatggcagg

SEQ ID NO: 8553 - DNA, 23 bp, Homo sapiens
  source 1..23: mol_type = genomic DNA
aacagcagatacagacaataggg

SEQ ID NO: 8554 - DNA, 23 bp, Homo sapiens
  source 1..23: mol_type = genomic DNA
tctagaatgactggtttagatgg

SEQ ID NO: 8555 - DNA, 23 bp, Homo sapiens
  source 1..23: mol_type = genomic DNA
tgtactccttgcaggtcgccggg

SEQ ID NO: 8556 - DNA, 23 bp, Homo sapiens
  source 1..23: mol_type = genomic DNA
ttttaaatacatcagggcttagg

SEQ ID NO: 8557 - DNA, 23 bp, Homo sapiens
  source 1..23: mol_type = genomic DNA
aataatcacttactaaaaatggg

SEQ ID NO: 8558 - DNA, 23 bp, Homo sapiens
  source 1..23: mol_type = genomic DNA
tgtctcttgataccagagatagg

SEQ ID NO: 8559 - DNA, 23 bp, Homo sapiens
  source 1..23: mol_type = genomic DNA
tgagctttcactgcccctacagg

SEQ ID NO: 8560 - DNA, 23 bp, Homo sapiens
  source 1..23: mol_type = genomic DNA
gtgacccaatgagaatcaattgg

SEQ ID NO: 8561 - DNA, 23 bp, Homo sapiens
  source 1..23: mol_type = genomic DNA
ccagttaagaagacaaaaatggg

SEQ ID NO: 8562 - DNA, 23 bp, Homo sapiens
  source 1..23: mol_type = genomic DNA
ggaaataaagatataaaaagtgg

SEQ ID NO: 8563 - DNA, 23 bp, Homo sapiens
  source 1..23: mol_type = genomic DNA
tatattttccatagagaccttgg

SEQ ID NO: 8564 - DNA, 23 bp, Homo sapiens
  source 1..23: mol_type = genomic DNA
caagtgggctcatccatcattgg

SEQ ID NO: 8565 - DNA, 23 bp, Homo sapiens
  source 1..23: mol_type = genomic DNA
ataaactgaaagtcaaatgtagg

SEQ ID NO: 8566 - DNA, 23 bp, Homo sapiens
  source 1..23: mol_type = genomic DNA
gcaggttatcatatgaatagtgg

SEQ ID NO: 8567 - DNA, 23 bp, Homo sapiens
  source 1..23: mol_type = genomic DNA
gttttattgccaaagttgtaagg

SEQ ID NO: 8568 - DNA, 23 bp, Homo sapiens
  source 1..23: mol_type = genomic DNA
tgtttagtactttctatatgagg

SEQ ID NO: 8569 - DNA, 23 bp, Homo sapiens
  source 1..23: mol_type = genomic DNA
taatagagaaaactgaagatagg

SEQ ID NO: 8570 - DNA, 23 bp, Homo sapiens
  source 1..23: mol_type = genomic DNA
tttcagccaaaaatttccttggg

SEQ ID NO: 8571 - DNA, 23 bp, Homo sapiens
  source 1..23: mol_type = genomic DNA
ataatactaaacacttacatagg

SEQ ID NO: 8572 - DNA, 23 bp, Homo sapiens
  source 1..23: mol_type = genomic DNA
acaaaaatgttgccacctactgg

SEQ ID NO: 8573 - DNA, 23 bp, Homo sapiens
  source 1..23: mol_type = genomic DNA
gtgttacttgacttgtcctcagg

SEQ ID NO: 8574 - DNA, 23 bp, Homo sapiens
  source 1..23: mol_type = genomic DNA
agaagagcttgaaaatcatatgg

SEQ ID NO: 8575 - DNA, 23 bp, Homo sapiens
  source 1..23: mol_type = genomic DNA
ataaatatgaattcccgtaatgg

SEQ ID NO: 8576 - DNA, 23 bp, Homo sapiens
  source 1..23: mol_type = genomic DNA
agtaaagaacatttactgaatgg

SEQ ID NO: 8577 - DNA, 23 bp, Homo sapiens
  source 1..23: mol_type = genomic DNA
gttaaaacaggttttcaaagagg

SEQ ID NO: 8578 - DNA, 23 bp, Homo sapiens
  source 1..23: mol_type = genomic DNA
agaaataatacatagaattacgg

SEQ ID NO: 8579 - DNA, 23 bp, Homo sapiens
  source 1..23: mol_type = genomic DNA
ggagtcttggatcaaataacagg

SEQ ID NO: 8580 - DNA, 23 bp, Homo sapiens
  source 1..23: mol_type = genomic DNA
ttatacatacctctcatcattgg

SEQ ID NO: 8581 - DNA, 23 bp, Homo sapiens
  source 1..23: mol_type = genomic DNA
atgatgttaatatttcagattgg

SEQ ID NO: 8582 - DNA, 23 bp, Homo sapiens
  source 1..23: mol_type = genomic DNA
attcagcttattaaaccctatgg

SEQ ID NO: 8583 - DNA, 23 bp, Homo sapiens
  source 1..23: mol_type = genomic DNA
tggaaatatttcattacctaggg

SEQ ID NO: 8584 - DNA, 23 bp, Homo sapiens
  source 1..23: mol_type = genomic DNA
ttttaccttatactgatatgagg

SEQ ID NO: 8585 - DNA, 23 bp, Homo sapiens
  source 1..23: mol_type = genomic DNA
gctaaaaacaaaggactttgagg

SEQ ID NO: 8586 - DNA, 23 bp, Homo sapiens
  source 1..23: mol_type = genomic DNA
tgactccctccttacaactttgg

SEQ ID NO: 8587 - DNA, 23 bp, Homo sapiens
  source 1..23: mol_type = genomic DNA
gaaactgtaaatctggaataggg

SEQ ID NO: 8588 - DNA, 23 bp, Homo sapiens
  source 1..23: mol_type = genomic DNA
tctatagcctattaaacaaaagg

SEQ ID NO: 8589 - DNA, 23 bp, Homo sapiens
  source 1..23: mol_type = genomic DNA
ggcaaattctcctaaatcaatgg

SEQ ID NO: 8590 - DNA, 23 bp, Homo sapiens
  source 1..23: mol_type = genomic DNA
gtgattttataaaagttgaatgg

SEQ ID NO: 8591 - DNA, 23 bp, Homo sapiens
  source 1..23: mol_type = genomic DNA
aataagactgtcttcacaactgg

SEQ ID NO: 8592 - DNA, 23 bp, Homo sapiens
  source 1..23: mol_type = genomic DNA
ctaactgtatttggaaatcaggg

SEQ ID NO: 8593 - DNA, 23 bp, Homo sapiens
  source 1..23: mol_type = genomic DNA
ccataggattaataaaacttagg

SEQ ID NO: 8594 - DNA, 23 bp, Homo sapiens
  source 1..23: mol_type = genomic DNA
tttggtacctcaaatagttcagg

SEQ ID NO: 8595 - DNA, 23 bp, Homo sapiens
  source 1..23: mol_type = genomic DNA
tcacacaaaataactaaaatggg

SEQ ID NO: 8596 - DNA, 23 bp, Homo sapiens
  source 1..23: mol_type = genomic DNA
cattttgtctatttgacactggg

SEQ ID NO: 8597 - DNA, 23 bp, Homo sapiens
  source 1..23: mol_type = genomic DNA
aaatgcttcaaattatacttagg

SEQ ID NO: 8598 - DNA, 23 bp, Homo sapiens
  source 1..23: mol_type = genomic DNA
tctttgacaaaggctgctaatgg

SEQ ID NO: 8599 - DNA, 23 bp, Homo sapiens
  source 1..23: mol_type = genomic DNA
acattttgtctatttgacactgg

SEQ ID NO: 8600 - DNA, 23 bp, Homo sapiens
  source 1..23: mol_type = genomic DNA
tgagaaatcatgtttttgacagg

SEQ ID NO: 8601 - DNA, 23 bp, Homo sapiens
  source 1..23: mol_type = genomic DNA
gtgcttgcttgcaatatttgtgg

SEQ ID NO: 8602 - DNA, 23 bp, Homo sapiens
  source 1..23: mol_type = genomic DNA
catgcttccatttcctcagttgg

SEQ ID NO: 8603 - DNA, 23 bp, Homo sapiens
  source 1..23: mol_type = genomic DNA
tttctatgttcacctcacttagg

SEQ ID NO: 8604 - DNA, 23 bp, Homo sapiens
  source 1..23: mol_type = genomic DNA
ggtcaattttgaagataaatggg

SEQ ID NO: 8605 - DNA, 23 bp, Homo sapiens
  source 1..23: mol_type = genomic DNA
acagggcttgtttctcaagttgg

SEQ ID NO: 8606 - DNA, 23 bp, Homo sapiens
  source 1..23: mol_type = genomic DNA
gttgaaatcaccaagacttaagg

SEQ ID NO: 8607 - DNA, 23 bp, Homo sapiens
  source 1..23: mol_type = genomic DNA
gtatgttagttaaatactaatgg

SEQ ID NO: 8608 - DNA, 23 bp, Homo sapiens
  source 1..23: mol_type = genomic DNA
atagaattacggctgattatggg

SEQ ID NO: 8609 - DNA, 23 bp, Homo sapiens
  source 1..23: mol_type = genomic DNA
ttccactgctttcagccaacagg

SEQ ID NO: 8610 - DNA, 23 bp, Homo sapiens
  source 1..23: mol_type = genomic DNA
acttgttcctgaactatttgagg

SEQ ID NO: 8611 - DNA, 23 bp, Homo sapiens
  source 1..23: mol_type = genomic DNA
ttacaaaaccctgtttgttaggg

SEQ ID NO: 8612 - DNA, 23 bp, Homo sapiens
  source 1..23: mol_type = genomic DNA
aaaataacgttctctataagagg

SEQ ID NO: 8613 - DNA, 23 bp, Homo sapiens
  source 1..23: mol_type = genomic DNA
tttgtcacaaaagtgctttaggg

SEQ ID NO: 8614 - DNA, 23 bp, Homo sapiens
  source 1..23: mol_type = genomic DNA
gctcatcttagacagctatatgg

SEQ ID NO: 8615 - DNA, 23 bp, Homo sapiens
  source 1..23: mol_type = genomic DNA
atttccacaaattcaatcaatgg

SEQ ID NO: 8616 - DNA, 23 bp, Homo sapiens
  source 1..23: mol_type = genomic DNA
tatgttagttaaatactaatggg

SEQ ID NO: 8617 - DNA, 23 bp, Homo sapiens
  source 1..23: mol_type = genomic DNA
cagcccatattcttaattctcgg

SEQ ID NO: 8618 - DNA, 23 bp, Homo sapiens
  source 1..23: mol_type = genomic DNA
tattatctgaaaagcttgatagg

SEQ ID NO: 8619 - DNA, 23 bp, Homo sapiens
  source 1..23: mol_type = genomic DNA
gagagagcatgtaactttatcgg

SEQ ID NO: 8620 - DNA, 23 bp, Homo sapiens
  source 1..23: mol_type = genomic DNA
atacaccaagcaaagatataggg

SEQ ID NO: 8621 - DNA, 23 bp, Homo sapiens
  source 1..23: mol_type = genomic DNA
gatttagagttctagttatgagg

SEQ ID NO: 8622 - DNA, 23 bp, Homo sapiens
  source 1..23: mol_type = genomic DNA
ccttcttgattttatgagaaagg

SEQ ID NO: 8623 - DNA, 23 bp, Homo sapiens
  source 1..23: mol_type = genomic DNA
atattataaacatataaaattgg

SEQ ID NO: 8624 - DNA, 23 bp, Homo sapiens
  source 1..23: mol_type = genomic DNA
agaatttctctgactagaaatgg

SEQ ID NO: 8625 - DNA, 23 bp, Homo sapiens
  source 1..23: mol_type = genomic DNA
tttaaaataacatttatataggg

SEQ ID NO: 8626 - DNA, 23 bp, Homo sapiens
  source 1..23: mol_type = genomic DNA
tcctctagcacgtttcgaattgg

SEQ ID NO: 8627 - DNA, 23 bp, Homo sapiens
  source 1..23: mol_type = genomic DNA
gtatatgtatatatgttctaagg

SEQ ID NO: 8628 - DNA, 23 bp, Homo sapiens
  source 1..23: mol_type = genomic DNA
agatgatgttacatgtagttagg

SEQ ID NO: 8629 - DNA, 23 bp, Homo sapiens
  source 1..23: mol_type = genomic DNA
gcaattcttgcatcatgtattgg

SEQ ID NO: 8630 - DNA, 23 bp, Homo sapiens
  source 1..23: mol_type = genomic DNA
ggagaacgagtgatgtaatttgg

SEQ ID NO: 8631 - DNA, 23 bp, Homo sapiens
  source 1..23: mol_type = genomic DNA
cactcccgtctcaaatataaggg

SEQ ID NO: 8632 - DNA, 23 bp, Homo sapiens
  source 1..23: mol_type = genomic DNA
ctttgtaaaggacaagaataggg

SEQ ID NO: 8633 - DNA, 23 bp, Homo sapiens
  source 1..23: mol_type = genomic DNA
ataccgagtaaaagattctaagg

SEQ ID NO: 8634 - DNA, 23 bp, Homo sapiens
  source 1..23: mol_type = genomic DNA
ttacgagtaccaacactattagg

SEQ ID NO: 8635 - DNA, 23 bp, Homo sapiens
  source 1..23: mol_type = genomic DNA
agcaatgttggccaactatacgg

SEQ ID NO: 8636 - DNA, 23 bp, Homo sapiens
  source 1..23: mol_type = genomic DNA
ttcattgtacacttacaatatgg

SEQ ID NO: 8637 - DNA, 23 bp, Homo sapiens
  source 1..23: mol_type = genomic DNA
aatgaaatttcaaatccatttgg

SEQ ID NO: 8638 - DNA, 23 bp, Homo sapiens
  source 1..23: mol_type = genomic DNA
tccattttcaaggtattgattgg

SEQ ID NO: 8639 - DNA, 23 bp, Homo sapiens
  source 1..23: mol_type = genomic DNA
tttctactcaagtcagataatgg

SEQ ID NO: 8640 - DNA, 23 bp, Homo sapiens
  source 1..23: mol_type = genomic DNA
ggctttatattacactaaaaagg

SEQ ID NO: 8641 - DNA, 23 bp, Homo sapiens
  source 1..23: mol_type = genomic DNA
cttaaatacgagctaggttaagg

SEQ ID NO: 8642 - DNA, 23 bp, Homo sapiens
  source 1..23: mol_type = genomic DNA
gaaagaggactacatatcttagg

SEQ ID NO: 8643 - DNA, 23 bp, Homo sapiens
  source 1..23: mol_type = genomic DNA
ctttacattgacatgcttaaggg

SEQ ID NO: 8644 - DNA, 23 bp, Homo sapiens
  source 1..23: mol_type = genomic DNA
gcagaactctggacaccttctgg

SEQ ID NO: 8645 - DNA, 23 bp, Homo sapiens
  source 1..23: mol_type = genomic DNA
agaatctctttccttgaataggg

SEQ ID NO: 8646 - DNA, 23 bp, Homo sapiens
  source 1..23: mol_type = genomic DNA
tgccttggtctaattctcttagg

SEQ ID NO: 8647 - DNA, 23 bp, Homo sapiens
  source 1..23: mol_type = genomic DNA
tgagcagaacaaacaaatattgg

SEQ ID NO: 8648 - DNA, 23 bp, Homo sapiens
  source 1..23: mol_type = genomic DNA
tgcccttgataaatgcctttagg

SEQ ID NO: 8649 - DNA, 23 bp, Homo sapiens
  source 1..23: mol_type = genomic DNA
ggtgtatgctccttaatcttagg

SEQ ID NO: 8650 - DNA, 23 bp, Homo sapiens
  source 1..23: mol_type = genomic DNA
tttctcagaaatttattagatgg

SEQ ID NO: 8651 - DNA, 23 bp, Homo sapiens
  source 1..23: mol_type = genomic DNA
atagcaagcctgtgaaaaaatgg

SEQ ID NO: 8652 - DNA, 23 bp, Homo sapiens
  source 1..23: mol_type = genomic DNA
tggagaggcactttgcctttagg

SEQ ID NO: 8653 - DNA, 23 bp, Homo sapiens
  source 1..23: mol_type = genomic DNA
cagagtgtatcatcaaaattagg

SEQ ID NO: 8654 - DNA, 23 bp, Homo sapiens
  source 1..23: mol_type = genomic DNA
aggagtggaagagagagaattgg

SEQ ID NO: 8655 - DNA, 23 bp, Homo sapiens
  source 1..23: mol_type = genomic DNA
atttcctaacctattttgatagg

SEQ ID NO: 8656 - DNA, 23 bp, Homo sapiens
  source 1..23: mol_type = genomic DNA
atgctgttagaaattttagatgg

SEQ ID NO: 8657 - DNA, 23 bp, Homo sapiens
  source 1..23: mol_type = genomic DNA
tttataaatataatgcaaaatgg

SEQ ID NO: 8658 - DNA, 23 bp, Homo sapiens
  source 1..23: mol_type = genomic DNA
aagacatcgctcattaaaaaagg

SEQ ID NO: 8659 - DNA, 23 bp, Homo sapiens
  source 1..23: mol_type = genomic DNA
cagcaacctcagaacaaaaaagg

SEQ ID NO: 8660 - DNA, 23 bp, Homo sapiens
  source 1..23: mol_type = genomic DNA
gggaggagtgtactccttgcagg

SEQ ID NO: 8661 - DNA, 23 bp, Homo sapiens
  source 1..23: mol_type = genomic DNA
gttctatgtccctggcaaaaagg

SEQ ID NO: 8662 - DNA, 23 bp, Homo sapiens
  source 1..23: mol_type = genomic DNA
gttcatacaaacattcgatttgg

SEQ ID NO: 8663 - DNA, 23 bp, Homo sapiens
  source 1..23: mol_type = genomic DNA
ttttagtatctactcattagagg

SEQ ID NO: 8664 - DNA, 23 bp, Homo sapiens
  source 1..23: mol_type = genomic DNA
tctgccacttttatagaaactgg

SEQ ID NO: 8665 - DNA, 23 bp, Homo sapiens
  source 1..23: mol_type = genomic DNA
ttagtgatacttttaatctaagg

SEQ ID NO: 8666 - DNA, 23 bp, Homo sapiens
  source 1..23: mol_type = genomic DNA
tgactttcagtttatttaacagg

SEQ ID NO: 8667 - DNA, 23 bp, Homo sapiens
  source 1..23: mol_type = genomic DNA
tttggagtaaaaatacaaattgg

SEQ ID NO: 8668 - DNA, 23 bp, Homo sapiens
  source 1..23: mol_type = genomic DNA
tatggtgcaatttttttcattgg

SEQ ID NO: 8669 - DNA, 23 bp, Homo sapiens
  source 1..23: mol_type = genomic DNA
tatcatggtaaagagctttatgg

SEQ ID NO: 8670 - DNA, 23 bp, Homo sapiens
  source 1..23: mol_type = genomic DNA
atataatatctgtttcaatttgg

SEQ ID NO: 8671 - DNA, 23 bp, Homo sapiens
  source 1..23: mol_type = genomic DNA
aagtggctgcaaatataatttgg

SEQ ID NO: 8672 - DNA, 23 bp, Homo sapiens
  source 1..23: mol_type = genomic DNA
ttaaagctcttctagattactgg

SEQ ID NO: 8673 - DNA, 23 bp, Homo sapiens
  source 1..23: mol_type = genomic DNA
cttttattccaaggtctctatgg

SEQ ID NO: 8674 - DNA, 23 bp, Homo sapiens
  source 1..23: mol_type = genomic DNA
agacccatcgattagaattatgg

SEQ ID NO: 8675 - DNA, 23 bp, Homo sapiens
  source 1..23: mol_type = genomic DNA
tttagctcaactctataaattgg

SEQ ID NO: 8676 - DNA, 23 bp, Homo sapiens
  source 1..23: mol_type = genomic DNA
ctgaaattgttcttattaaaggg

SEQ ID NO: 8677 - DNA, 23 bp, Homo sapiens
  source 1..23: mol_type = genomic DNA
aactcagtacatattctatttgg

SEQ ID NO: 8678 - DNA, 23 bp, Homo sapiens
  source 1..23: mol_type = genomic DNA
ataagtttaccaattgattatgg

SEQ ID NO: 8679 - DNA, 23 bp, Homo sapiens
  source 1..23: mol_type = genomic DNA
gcagaggtgcagattatatttgg

SEQ ID NO: 8680 - DNA, 23 bp, Homo sapiens
  source 1..23: mol_type = genomic DNA
ttttatataaaacctgaaattgg

SEQ ID NO: 8681 - DNA, 23 bp, Homo sapiens
  source 1..23: mol_type = genomic DNA
acaaagagttgaaaattaattgg

SEQ ID NO: 8682 - DNA, 23 bp, Homo sapiens
  source 1..23: mol_type = genomic DNA
gttaagtgaatgaacaaaattgg

SEQ ID NO: 8683 - DNA, 23 bp, Homo sapiens
  source 1..23: mol_type = genomic DNA
ttaatcagtcatttataaatagg

SEQ ID NO: 8684 - DNA, 23 bp, Homo sapiens
  source 1..23: mol_type = genomic DNA
ttaaagtcattttaactatttgg

SEQ ID NO: 8685 - DNA, 23 bp, Homo sapiens
  source 1..23: mol_type = genomic DNA
ttacatttggtaaagatatttgg

SEQ ID NO: 8686 - DNA, 23 bp, Homo sapiens
  source 1..23: mol_type = genomic DNA
gtttggttcaattagattttagg

SEQ ID NO: 8687 - DNA, 23 bp, Homo sapiens
  source 1..23: mol_type = genomic DNA
gcttcatgatatggtataattgg

SEQ ID NO: 8688 - DNA, 23 bp, Homo sapiens
  source 1..23: mol_type = genomic DNA
tttactgatgtttttctaaatgg

SEQ ID NO: 8689 - DNA, 23 bp, Homo sapiens
  source 1..23: mol_type = genomic DNA
tcatgtacccctgacaaagaagg

SEQ ID NO: 8690 - DNA, 23 bp, Homo sapiens
  source 1..23: mol_type = genomic DNA
gttaacttccttctttgtcaggg

SEQ ID NO: 8691 - DNA, 23 bp, Homo sapiens
  source 1..23: mol_type = genomic DNA
aggatgtaagagagtaattgagg

SEQ ID NO: 8692 - DNA, 23 bp, Homo sapiens
  source 1..23: mol_type = genomic DNA
tctttgtcaggggtacatgatgg

SEQ ID NO: 8693 - DNA, 23 bp, Homo sapiens
  source 1..23: mol_type = genomic DNA
ctgggaatataaatctaaatggg

SEQ ID NO: 8694 - DNA, 23 bp, Homo sapiens
  source 1..23: mol_type = genomic DNA
aattagaactctaggtaaatcgg

SEQ ID NO: 8695 - DNA, 23 bp, Homo sapiens
  source 1..23: mol_type = genomic DNA
agatttatattcccagtaaaagg

SEQ ID NO: 8696 - DNA, 23 bp, Homo sapiens
  source 1..23: mol_type = genomic DNA
ctactgcttaatcacccatgggg

SEQ ID NO: 8697 - DNA, 23 bp, Homo sapiens
  source 1..23: mol_type = genomic DNA
aacatgaaccagatgcacagagg

SEQ ID NO: 8698 - DNA, 23 bp, Homo sapiens
  source 1..23: mol_type = genomic DNA
aataacataaagaagctgcgtgg

SEQ ID NO: 8699 - DNA, 23 bp, Homo sapiens
  source 1..23: mol_type = genomic DNA
tggaaacctagagtgcacaaagg

SEQ ID NO: 8700 - DNA, 23 bp, Homo sapiens
  source 1..23: mol_type = genomic DNA
atagactttataaaacctagagg

SEQ ID NO: 8701 - DNA, 23 bp, Homo sapiens
  source 1..23: mol_type = genomic DNA
ggcctaggttcacagcccagcgg

SEQ ID NO: 8702 - DNA, 23 bp, Homo sapiens
  source 1..23: mol_type = genomic DNA
cacaaaggagaagacactggtgg

SEQ ID NO: 8703 - DNA, 23 bp, Homo sapiens
  source 1..23: mol_type = genomic DNA
agagtcaaatagacacttggggg

SEQ ID NO: 8704 - DNA, 23 bp, Homo sapiens
  source 1..23: mol_type = genomic DNA
taattcatagtaatctcctgggg

SEQ ID NO: 8705 - DNA, 23 bp, Homo sapiens
  source 1..23: mol_type = genomic DNA
gctcaaaaattctagcaaggtgg

SEQ ID NO: 8706 - DNA, 23 bp, Homo sapiens
  source 1..23: mol_type = genomic DNA
agggtttggatagatccagtcgg

SEQ ID NO: 8707 - DNA, 23 bp, Homo sapiens
  source 1..23: mol_type = genomic DNA
agatacgttttcatgtccggggg

SEQ ID NO: 8708 - DNA, 23 bp, Homo sapiens
  source 1..23: mol_type = genomic DNA
tgactggcaatagagagccgagg

SEQ ID NO: 8709 - DNA, 23 bp, Homo sapiens
  source 1..23: mol_type = genomic DNA
aagcccactatcagtcaccccgg

SEQ ID NO: 8710 - DNA, 23 bp, Homo sapiens
  source 1..23: mol_type = genomic DNA
gaagaacctaaggattgtggagg

SEQ ID NO: 8711 - DNA, 23 bp, Homo sapiens
  source 1..23: mol_type = genomic DNA
gtgcacaaaggagaagacactgg

SEQ ID NO: 8712 - DNA, 23 bp, Homo sapiens
  source 1..23: mol_type = genomic DNA
tcactacccctagatgtgagagg

SEQ ID NO: 8713 - DNA, 23 bp, Homo sapiens
  source 1..23: mol_type = genomic DNA
tctgagaaataatagttccgggg

SEQ ID NO: 8714 - DNA, 23 bp, Homo sapiens
  source 1..23: mol_type = genomic DNA
tggttgtagagcttaccgctggg

SEQ ID NO: 8715 - DNA, 23 bp, Homo sapiens
  source 1..23: mol_type = genomic DNA
gaagtcttacacatttgaggggg

SEQ ID NO: 8716 - DNA, 23 bp, Homo sapiens
  source 1..23: mol_type = genomic DNA
acacttctctctgtaagtggagg

SEQ ID NO: 8717 - DNA, 23 bp, Homo sapiens
  source 1..23: mol_type = genomic DNA
gaggtgctgaacaaatgagtggg

SEQ ID NO: 8718 - DNA, 23 bp, Homo sapiens
  source 1..23: mol_type = genomic DNA
ttagagacacatttaccatgagg

SEQ ID NO: 8719 - DNA, 23 bp, Homo sapiens
  source 1..23: mol_type = genomic DNA
atgttgatatcataccccatggg

SEQ ID NO: 8720 - DNA, 23 bp, Homo sapiens
  source 1..23: mol_type = genomic DNA
gctgtggaatacacttgggatgg

SEQ ID NO: 8721 - DNA, 23 bp, Homo sapiens
  source 1..23: mol_type = genomic DNA
attagcaaggaagtgagtagtgg

SEQ ID NO: 8722 - DNA, 23 bp, Homo sapiens
  source 1..23: mol_type = genomic DNA
cagagctcaagaaatctctgtgg

SEQ ID NO: 8723 - DNA, 23 bp, Homo sapiens
  source 1..23: mol_type = genomic DNA
ctattaaatatgatcaagagtgg

SEQ ID NO: 8724 - DNA, 23 bp, Homo sapiens
  source 1..23: mol_type = genomic DNA
ataaaattacagggaaacagggg

SEQ ID NO: 8725 - DNA, 23 bp, Homo sapiens
  source 1..23: mol_type = genomic DNA
ttaaaaaaaaaaaaggaccaagg

SEQ ID NO: 8726 - DNA, 23 bp, Homo sapiens
  source 1..23: mol_type = genomic DNA
tggcaaggacagtaaagaggtgg

SEQ ID NO: 8727 - DNA, 23 bp, Homo sapiens
  source 1..23: mol_type = genomic DNA
ggcagacatcccttgaagggggg

SEQ ID NO: 8728 - DNA, 23 bp, Homo sapiens
  source 1..23: mol_type = genomic DNA
ttattcgcctgctgtgatcgtgg

SEQ ID NO: 8729 - DNA, 23 bp, Homo sapiens
  source 1..23: mol_type = genomic DNA
atttttctatcaagtgacgtggg

SEQ ID NO: 8730 - DNA, 23 bp, Homo sapiens
  source 1..23: mol_type = genomic DNA
gacgcttccttccttcactgagg

SEQ ID NO: 8731 - DNA, 23 bp, Homo sapiens
  source 1..23: mol_type = genomic DNA
tgaagtcttacacatttgagggg

SEQ ID NO: 8732 - DNA, 23 bp, Homo sapiens
  source 1..23: mol_type = genomic DNA
tggcagacatcccttgaaggggg

SEQ ID NO: 8733 - DNA, 23 bp, Homo sapiens
  source 1..23: mol_type = genomic DNA
ggaggtgctgaacaaatgagtgg

SEQ ID NO: 8734 - DNA, 23 bp, Homo sapiens
  source 1..23: mol_type = genomic DNA
attgtacctctcacatctagggg

SEQ ID NO: 8735 - DNA, 23 bp, Homo sapiens
  source 1..23: mol_type = genomic DNA
ataaaagcaacagaattggaggg

SEQ ID NO: 8736 - DNA, 23 bp, Homo sapiens
  source 1..23: mol_type = genomic DNA
actcttcatataaaattacaggg

SEQ ID NO: 8737 - DNA, 23 bp, Homo sapiens
  source 1..23: mol_type = genomic DNA
catacatagtcaaagtggcaagg

SEQ ID NO: 8738 - DNA, 23 bp, Homo sapiens
  source 1..23: mol_type = genomic DNA
aaaatacacctaataaaaggagg

SEQ ID NO: 8739 - DNA, 23 bp, Homo sapiens
  source 1..23: mol_type = genomic DNA
ttatgtcaatctcagctaggtgg

SEQ ID NO: 8740 - DNA, 23 bp, Homo sapiens
  source 1..23: mol_type = genomic DNA
acttgaataatagtaactgtggg

SEQ ID NO: 8741 - DNA, 23 bp, Homo sapiens
  source 1..23: mol_type = genomic DNA
ttggagaatgaagtgaggcaagg

SEQ ID NO: 8742 - DNA, 23 bp, Homo sapiens
  source 1..23: mol_type = genomic DNA
ccattgcaaggctgaaccagagg

SEQ ID NO: 8743 - DNA, 23 bp, Homo sapiens
  source 1..23: mol_type = genomic DNA
gttgcaattttaattccaggagg

SEQ ID NO: 8744 - DNA, 23 bp, Homo sapiens
  source 1..23: mol_type = genomic DNA
tgatcgcacaaggtgcaggatgg

SEQ ID NO: 8745 - DNA, 23 bp, Homo sapiens
  source 1..23: mol_type = genomic DNA
aactctgttagaatgtaggaagg

SEQ ID NO: 8746 - DNA, 23 bp, Homo sapiens
  source 1..23: mol_type = genomic DNA
taatgctgtggaatacacttggg

SEQ ID NO: 8747 - DNA, 23 bp, Homo sapiens
  source 1..23: mol_type = genomic DNA
aagatattaacattaataggagg

SEQ ID NO: 8748 - DNA, 23 bp, Homo sapiens
  source 1..23: mol_type = genomic DNA
ggatgtctgccattaagtgaagg

SEQ ID NO: 8749 - DNA, 23 bp, Homo sapiens
  source 1..23: mol_type = genomic DNA
agaaactaaaacttctgtgacgg

SEQ ID NO: 8750 - DNA, 23 bp, Homo sapiens
  source 1..23: mol_type = genomic DNA
gagcatttagcctccaggagagg

SEQ ID NO: 8751 - DNA, 23 bp, Homo sapiens
  source 1..23: mol_type = genomic DNA
gtggacccacagattaaggtagg

SEQ ID NO: 8752 - DNA, 23 bp, Homo sapiens
  source 1..23: mol_type = genomic DNA
atagaacatgaaagattactggg

SEQ ID NO: 8753 - DNA, 23 bp, Homo sapiens
  source 1..23: mol_type = genomic DNA
tatagtgtgaaattatggagggg

SEQ ID NO: 8754 - DNA, 23 bp, Homo sapiens
  source 1..23: mol_type = genomic DNA
aatacacttgggatggtaggagg

SEQ ID NO: 8755 - DNA, 23 bp, Homo sapiens
  source 1..23: mol_type = genomic DNA
gaacacatacatagtcaaagtgg

SEQ ID NO: 8756 - DNA, 23 bp, Homo sapiens
  source 1..23: mol_type = genomic DNA
tacagcttcacagatgctgaggg

SEQ ID NO: 8757 - DNA, 23 bp, Homo sapiens
  source 1..23: mol_type = genomic DNA
ttttatatgaagagtgtgagtgg

SEQ ID NO: 8758 - DNA, 23 bp, Homo sapiens
  source 1..23: mol_type = genomic DNA
acgcaaacttcactgcacttggg

SEQ ID NO: 8759 - DNA, 23 bp, Homo sapiens
  source 1..23: mol_type = genomic DNA
gttccggggtgactgatagtggg

SEQ ID NO: 8760 - DNA, 23 bp, Homo sapiens
  source 1..23: mol_type = genomic DNA
tttctctaatcgctaaaccaagg

SEQ ID NO: 8761 - DNA, 23 bp, Homo sapiens
  source 1..23: mol_type = genomic DNA
aaactgttcagctatatggatgg

SEQ ID NO: 8762 - DNA, 23 bp, Homo sapiens
  source 1..23: mol_type = genomic DNA
atctagttactgaggcaagtagg

SEQ ID NO: 8763 - DNA, 23 bp, Homo sapiens
  source 1..23: mol_type = genomic DNA
aaaacttacaaattaccaagagg

SEQ ID NO: 8764 - DNA, 23 bp, Homo sapiens
  source 1..23: mol_type = genomic DNA
ggatgctgcatactattggcagg

SEQ ID NO: 8765 - DNA, 23 bp, Homo sapiens
  source 1..23: mol_type = genomic DNA
ggagggaaaatacaatagcaagg

SEQ ID NO: 8766 - DNA, 23 bp, Homo sapiens
  source 1..23: mol_type = genomic DNA
gtaatgaatttaaagtccaaagg

SEQ ID NO: 8767 - DNA, 23 bp, Homo sapiens
  source 1..23: mol_type = genomic DNA
agatttatgtgacactggcaggg

SEQ ID NO: 8768 - DNA, 23 bp, Homo sapiens
  source 1..23: mol_type = genomic DNA
atagtggtaggttaaagagctgg

SEQ ID NO: 8769 - DNA, 23 bp, Homo sapiens
  source 1..23: mol_type = genomic DNA
catctggttggggatttttgggg

SEQ ID NO: 8770 - DNA, 23 bp, Homo sapiens
  source 1..23: mol_type = genomic DNA
actggcagggaagtatcaaaggg

SEQ ID NO: 8771 - DNA, 23 bp, Homo sapiens
  source 1..23: mol_type = genomic DNA
aaaggcacagaagcatgcacagg

SEQ ID NO: 8772 - DNA, 23 bp, Homo sapiens
  source 1..23: mol_type = genomic DNA
ttttggtttatatcagcaggagg

SEQ ID NO: 8773 - DNA, 23 bp, Homo sapiens
  source 1..23: mol_type = genomic DNA
gtaggtaaactaggccagtaggg

SEQ ID NO: 8774 - DNA, 23 bp, Homo sapiens
  source 1..23: mol_type = genomic DNA
atagctggtccgaagtattgggg

SEQ ID NO: 8775 - DNA, 23 bp, Homo sapiens
  source 1..23: mol_type = genomic DNA
agttttctgggtgattagcaagg

SEQ ID NO: 8776 - DNA, 23 bp, Homo sapiens
  source 1..23: mol_type = genomic DNA
gcatctattggacattgagaagg

SEQ ID NO: 8777 - DNA, 23 bp, Homo sapiens
  source 1..23: mol_type = genomic DNA
atgtcattcctcatagacattgg

SEQ ID NO: 8778 - DNA, 23 bp, Homo sapiens
  source 1..23: mol_type = genomic DNA
tatggaatgttcgcatttggggg

SEQ ID NO: 8779 - DNA, 23 bp, Homo sapiens
  source 1..23: mol_type = genomic DNA
tcattcctcatagacattggagg

SEQ ID NO: 8780 - DNA, 23 bp, Homo sapiens
  source 1..23: mol_type = genomic DNA
actaaaactaaacagagaagtgg

SEQ ID NO: 8781 - DNA, 23 bp, Homo sapiens
  source 1..23: mol_type = genomic DNA
ttatttctgaggatagtggtagg

SEQ ID NO: 8782 - DNA, 23 bp, Homo sapiens
  source 1..23: mol_type = genomic DNA
acattcggttaggttgcacatgg

SEQ ID NO: 8783 - DNA, 23 bp, Homo sapiens
  source 1..23: mol_type = genomic DNA
aagctcttgaatcttccctaagg

SEQ ID NO: 8784 - DNA, 23 bp, Homo sapiens
  source 1..23: mol_type = genomic DNA
gaactagaggacaatagcgatgg

SEQ ID NO: 8785 - DNA, 23 bp, Homo sapiens
  source 1..23: mol_type = genomic DNA
atgaacacattagttttaggggg

SEQ ID NO: 8786 - DNA, 23 bp, Homo sapiens
  source 1..23: mol_type = genomic DNA
tataaaattacagggaaacaggg

SEQ ID NO: 8787 - DNA, 23 bp, Homo sapiens
  source 1..23: mol_type = genomic DNA
ttagtggacctggtaaacactgg

SEQ ID NO: 8788 - DNA, 23 bp, Homo sapiens
  source 1..23: mol_type = genomic DNA
taataactatggcaattagtggg

SEQ ID NO: 8789 - DNA, 23 bp, Homo sapiens
  source 1..23: mol_type = genomic DNA
tgttgcatggcaataatgaatgg

SEQ ID NO: 8790 - DNA, 23 bp, Homo sapiens
  source 1..23: mol_type = genomic DNA
cagatacgttttcatgtccgggg

SEQ ID NO: 8791 - DNA, 23 bp, Homo sapiens
  source 1..23: mol_type = genomic DNA
aaaacgtgattatgaaaagaggg

SEQ ID NO: 8792 - DNA, 23 bp, Homo sapiens
  source 1..23: mol_type = genomic DNA
tcacaggcctcagtgaaggaagg

SEQ ID NO: 8793 - DNA, 23 bp, Homo sapiens
  source 1..23: mol_type = genomic DNA
aaaagtctatgtgatagaagtgg

SEQ ID NO: 8794 - DNA, 23 bp, Homo sapiens
  source 1..23: mol_type = genomic DNA
taccttaagtagactagcagtgg

SEQ ID NO: 8795 - DNA, 23 bp, Homo sapiens
  source 1..23: mol_type = genomic DNA
tttttaacataaccttgccaagg

SEQ ID NO: 8796 - DNA, 23 bp, Homo sapiens
  source 1..23: mol_type = genomic DNA
tttctgaactatttactgtgagg

SEQ ID NO: 8797 - DNA, 23 bp, Homo sapiens
  source 1..23: mol_type = genomic DNA
taaaacttctgtgacggtaaggg

SEQ ID NO: 8798 - DNA, 23 bp, Homo sapiens
  source 1..23: mol_type = genomic DNA
gcagatgtcatcaggagccaagg

SEQ ID NO: 8799 - DNA, 23 bp, Homo sapiens
  source 1..23: mol_type = genomic DNA
ctattttctatatctttgtgggg

SEQ ID NO: 8800 - DNA, 23 bp, Homo sapiens
  source 1..23: mol_type = genomic DNA
ggcaataatgaatggtccatagg

SEQ ID NO: 8801 - DNA, 23 bp, Homo sapiens
  source 1..23: mol_type = genomic DNA
catagcctaccttaatctgtggg

SEQ ID NO: 8802 - DNA, 23 bp, Homo sapiens
  source 1..23: mol_type = genomic DNA
accctgcaacctgatcttggagg

SEQ ID NO: 8803 - DNA, 23 bp, Homo sapiens
  source 1..23: mol_type = genomic DNA
tagtggacctggtaaacactggg

SEQ ID NO: 8804 - DNA, 23 bp, Homo sapiens
  source 1..23: mol_type = genomic DNA
ctgcaaagcctgacactgcatgg

SEQ ID NO: 8805 - DNA, 23 bp, Homo sapiens
  source 1..23: mol_type = genomic DNA
gcacagtcttgggtcacacaggg

SEQ ID NO: 8806 - DNA, 23 bp, Homo sapiens
  source 1..23: mol_type = genomic DNA
acaaagatatagaaaatagtggg

SEQ ID NO: 8807 - DNA, 23 bp, Homo sapiens
  source 1..23: mol_type = genomic DNA
aacagaagatatctaagtagagg

SEQ ID NO: 8808 - DNA, 23 bp, Homo sapiens
  source 1..23: mol_type = genomic DNA
attggcttactcctcttaagggg

SEQ ID NO: 8809 - DNA, 23 bp, Homo sapiens
  source 1..23: mol_type = genomic DNA
tggtatgtaacattacatacagg

SEQ ID NO: 8810 - DNA, 23 bp, Homo sapiens
  source 1..23: mol_type = genomic DNA
tgataacaaccccaatacttcgg

SEQ ID NO: 8811 - DNA, 23 bp, Homo sapiens
  source 1..23: mol_type = genomic DNA
gctaatcacccagaaaactctgg

SEQ ID NO: 8812 - DNA, 23 bp, Homo sapiens
  source 1..23: mol_type = genomic DNA
gtgagtagtggtccattgcaagg

SEQ ID NO: 8813 - DNA, 23 bp, Homo sapiens
  source 1..23: mol_type = genomic DNA
tatcctcatacactaatgccagg

SEQ ID NO: 8814 - DNA, 23 bp, Homo sapiens
  source 1..23: mol_type = genomic DNA
gatgtcagcatacttcgtgttgg

SEQ ID NO: 8815 - DNA, 23 bp, Homo sapiens
  source 1..23: mol_type = genomic DNA
actgccaactgccaaagaatggg

SEQ ID NO: 8816 - DNA, 23 bp, Homo sapiens
  source 1..23: mol_type = genomic DNA
aaagagcatcagtaaagtgcagg

SEQ ID NO: 8817 - DNA, 23 bp, Homo sapiens
  source 1..23: mol_type = genomic DNA
cagtgcagcttgatcgcacaagg

SEQ ID NO: 8818 - DNA, 23 bp, Homo sapiens
  source 1..23: mol_type = genomic DNA
tgaagctgtagaaaccctactgg

SEQ ID NO: 8819 - DNA, 23 bp, Homo sapiens
  source 1..23: mol_type = genomic DNA
ctacagcttcacagatgctgagg

SEQ ID NO: 8820 - DNA, 23 bp, Homo sapiens
  source 1..23: mol_type = genomic DNA
atattagttgtaaaatacactgg

SEQ ID NO: 8821 - DNA, 23 bp, Homo sapiens
  source 1..23: mol_type = genomic DNA
ttgcagttattttttcacaatgg

SEQ ID NO: 8822 - DNA, 23 bp, Homo sapiens
  source 1..23: mol_type = genomic DNA
gagagctgtcatcccacccccgg

SEQ ID NO: 8823 - DNA, 23 bp, Homo sapiens
  source 1..23: mol_type = genomic DNA
tatgttgatatcataccccatgg

SEQ ID NO: 8824 - DNA, 23 bp, Homo sapiens
  source 1..23: mol_type = genomic DNA
ttttggggtagggaccagaatgg

SEQ ID NO: 8825 - DNA, 23 bp, Homo sapiens
  source 1..23: mol_type = genomic DNA
gctactgcttaatcacccatggg

SEQ ID NO: 8826 - DNA, 23 bp, Homo sapiens
  source 1..23: mol_type = genomic DNA
tgccacttgtgaggacccaaggg

SEQ ID NO: 8827 - DNA, 23 bp, Homo sapiens
  source 1..23: mol_type = genomic DNA
gggtagggaccagaatggctggg

SEQ ID NO: 8828 - DNA, 23 bp, Homo sapiens
  source 1..23: mol_type = genomic DNA
tatttttctatcaagtgacgtgg

SEQ ID NO: 8829 - DNA, 23 bp, Homo sapiens
  source 1..23: mol_type = genomic DNA
gagtggggaggttaacctctggg

SEQ ID NO: 8830 - DNA, 23 bp, Homo sapiens
  source 1..23: mol_type = genomic DNA
aattacacaactttatgttgagg

SEQ ID NO: 8831 - DNA, 23 bp, Homo sapiens
  source 1..23: mol_type = genomic DNA
tttttatgtcaatctcagctagg

SEQ ID NO: 8832 - DNA, 23 bp, Homo sapiens
  source 1..23: mol_type = genomic DNA
taatatttttcaactatccgagg

SEQ ID NO: 8833 - DNA, 23 bp, Homo sapiens
  source 1..23: mol_type = genomic DNA
gtaataagttgctttcaaagagg

SEQ ID NO: 8834 - DNA, 23 bp, Homo sapiens
  source 1..23: mol_type = genomic DNA
ttagcatttccattctctagtgg

SEQ ID NO: 8835 - DNA, 23 bp, Homo sapiens
  source 1..23: mol_type = genomic DNA
atcacacctccacaatccttagg

SEQ ID NO: 8836 - DNA, 23 bp, Homo sapiens
  source 1..23: mol_type = genomic DNA
agtaggtaaactaggccagtagg

SEQ ID NO: 8837 - DNA, 23 bp, Homo sapiens
  source 1..23: mol_type = genomic DNA
tgcacagtcttgggtcacacagg

SEQ ID NO: 8838 - DNA, 23 bp, Homo sapiens
  source 1..23: mol_type = genomic DNA
ttttgcctatacctactgtcagg

SEQ ID NO: 8839 - DNA, 23 bp, Homo sapiens
  source 1..23: mol_type = genomic DNA
ttatagtgtgaaattatggaggg

SEQ ID NO: 8840 - DNA, 23 bp, Homo sapiens
  source 1..23: mol_type = genomic DNA
ctattggactaataagaagtagg

SEQ ID NO: 8841 - DNA, 23 bp, Homo sapiens
  source 1..23: mol_type = genomic DNA
tctgattgcaatgttcctcatgg

SEQ ID NO: 8842 - DNA, 23 bp, Homo sapiens
  source 1..23: mol_type = genomic DNA
aatggcagacatcccttgaaggg

SEQ ID NO: 8843 - DNA, 23 bp, Homo sapiens
  source 1..23: mol_type = genomic DNA
acctccaagatcaggttgcaggg

SEQ ID NO: 8844 - DNA, 23 bp, Homo sapiens
  source 1..23: mol_type = genomic DNA
aggaaataatggcttccgactgg

SEQ ID NO: 8845 - DNA, 23 bp, Homo sapiens
  source 1..23: mol_type = genomic DNA
atgagtctcgaagtttattgtgg

SEQ ID NO: 8846 - DNA, 23 bp, Homo sapiens
  source 1..23: mol_type = genomic DNA
gtgtggatgctgcatactattgg

SEQ ID NO: 8847 - DNA, 23 bp, Homo sapiens
  source 1..23: mol_type = genomic DNA
gccagtaactgtgaattctaggg

SEQ ID NO: 8848 - DNA, 23 bp, Homo sapiens
  source 1..23: mol_type = genomic DNA
gtgatagtttgaataaaagccgg

SEQ ID NO: 8849 - DNA, 23 bp, Homo sapiens
  source 1..23: mol_type = genomic DNA
attatagtgtgaaattatggagg

SEQ ID NO: 8850 - DNA, 23 bp, Homo sapiens
  source 1..23: mol_type = genomic DNA
ctttactgaagggcatacttggg

SEQ ID NO: 8851 - DNA, 23 bp, Homo sapiens
  source 1..23: mol_type = genomic DNA
aatcctctccagtttgcctaagg

SEQ ID NO: 8852 - DNA, 23 bp, Homo sapiens
  source 1..23: mol_type = genomic DNA
ttctctctctacctaagacaggg

SEQ ID NO: 8853 - DNA, 23 bp, Homo sapiens
  source 1..23: mol_type = genomic DNA
tgaaataactagtaatgaagagg

SEQ ID NO: 8854 - DNA, 23 bp, Homo sapiens
  source 1..23: mol_type = genomic DNA
atcatcaccacgatcacagcagg

SEQ ID NO: 8855 - DNA, 23 bp, Homo sapiens
  source 1..23: mol_type = genomic DNA
tttttatttgtaatttctggggg

SEQ ID NO: 8856 - DNA, 23 bp, Homo sapiens
  source 1..23: mol_type = genomic DNA
tttgtcctccaatgtctatgagg

SEQ ID NO: 8857 - DNA, 23 bp, Homo sapiens
  source 1..23: mol_type = genomic DNA
agaggaagaagcaaaattgaagg

SEQ ID NO: 8858 - DNA, 23 bp, Homo sapiens
  source 1..23: mol_type = genomic DNA
ttaatgctgtggaatacacttgg

SEQ ID NO: 8859 - DNA, 23 bp, Homo sapiens
  source 1..23: mol_type = genomic DNA
tgcctcacttcattctccaatgg

SEQ ID NO: 8860 - DNA, 23 bp, Homo sapiens
  source 1..23: mol_type = genomic DNA
agtattataaatctttaccttgg

SEQ ID NO: 8861 - DNA, 23 bp, Homo sapiens
  source 1..23: mol_type = genomic DNA
aatgtattcaaatccacagttgg

SEQ ID NO: 8862 - DNA, 23 bp, Homo sapiens
  source 1..23: mol_type = genomic DNA
gcaaatagtagtccatatgctgg

SEQ ID NO: 8863 - DNA, 23 bp, Homo sapiens
  source 1..23: mol_type = genomic DNA
ggaaagaaggtgctgtaaagagg

SEQ ID NO: 8864 - DNA, 23 bp, Homo sapiens
  source 1..23: mol_type = genomic DNA
tagcatttccattctctagtggg

SEQ ID NO: 8865 - DNA, 23 bp, Homo sapiens
  source 1..23: mol_type = genomic DNA
attttgtcctataggaaggaagg

SEQ ID NO: 8866 - DNA, 23 bp, Homo sapiens
  source 1..23: mol_type = genomic DNA
atttgactctggaaataagatgg

SEQ ID NO: 8867 - DNA, 23 bp, Homo sapiens
  source 1..23: mol_type = genomic DNA
taatcgctaaaccaaggcttagg

SEQ ID NO: 8868 - DNA, 23 bp, Homo sapiens
  source 1..23: mol_type = genomic DNA
ctgaggcaattagaaaaggctgg

SEQ ID NO: 8869 - DNA, 23 bp, Homo sapiens
  source 1..23: mol_type = genomic DNA
ccagatgcacagaggtaacatgg

SEQ ID NO: 8870 - DNA, 23 bp, Homo sapiens
  source 1..23: mol_type = genomic DNA
ttattgtaaacactctcaaaagg

SEQ ID NO: 8871 - DNA, 23 bp, Homo sapiens
  source 1..23: mol_type = genomic DNA
gatacatgacatgctctccttgg

SEQ ID NO: 8872 - DNA, 23 bp, Homo sapiens
  source 1..23: mol_type = genomic DNA
atattgacttaataaaaaagagg

SEQ ID NO: 8873 - DNA, 23 bp, Homo sapiens
  source 1..23: mol_type = genomic DNA
cccttccttactttactgaaggg

SEQ ID NO: 8874 - DNA, 23 bp, Homo sapiens
  source 1..23: mol_type = genomic DNA
tccaagttgaagctaatcattgg

SEQ ID NO: 8875 - DNA, 23 bp, Homo sapiens
  source 1..23: mol_type = genomic DNA
gttttgtaattgaccagtatcgg

SEQ ID NO: 8876 - DNA, 23 bp, Homo sapiens
  source 1..23: mol_type = genomic DNA
gactgccaactgccaaagaatgg

SEQ ID NO: 8877 - DNA, 23 bp, Homo sapiens
  source 1..23: mol_type = genomic DNA
agatgagatatccatttaagtgg

SEQ ID NO: 8878 - DNA, 23 bp, Homo sapiens
  source 1..23: mol_type = genomic DNA
cttcaagtcgtcatttagacggg

SEQ ID NO: 8879 - DNA, 23 bp, Homo sapiens
  source 1..23: mol_type = genomic DNA
ccctaaaccttccttcctatagg

SEQ ID NO: 8880 - DNA, 23 bp, Homo sapiens
  source 1..23: mol_type = genomic DNA
atacttcgtgttgggaaagaagg

SEQ ID NO: 8881 - DNA, 23 bp, Homo sapiens
  source 1..23: mol_type = genomic DNA
gaataattattaagaaggcaagg

SEQ ID NO: 8882 - DNA, 23 bp, Homo sapiens
  source 1..23: mol_type = genomic DNA
tttgaataatgtttttcaagagg

SEQ ID NO: 8883 - DNA, 23 bp, Homo sapiens
  source 1..23: mol_type = genomic DNA
gtatgctgacatcttgggctagg

SEQ ID NO: 8884 - DNA, 23 bp, Homo sapiens
  source 1..23: mol_type = genomic DNA
ccttcaagtcgtcatttagacgg

SEQ ID NO: 8885 - DNA, 23 bp, Homo sapiens
  source 1..23: mol_type = genomic DNA
gtatgcccttcagtaaagtaagg

SEQ ID NO: 8886 - DNA, 23 bp, Homo sapiens
  source 1..23: mol_type = genomic DNA
ctgttttcaaacttgttctgagg

SEQ ID NO: 8887 - DNA, 23 bp, Homo sapiens
  source 1..23: mol_type = genomic DNA
taatagatggagtaaattagtgg

SEQ ID NO: 8888 - DNA, 23 bp, Homo sapiens
  source 1..23: mol_type = genomic DNA
ctattaggaccatcaaatacagg

SEQ ID NO: 8889 - DNA, 23 bp, Homo sapiens
  source 1..23: mol_type = genomic DNA
ttggtaatctaattatctgtcgg

SEQ ID NO: 8890 - DNA, 23 bp, Homo sapiens
  source 1..23: mol_type = genomic DNA
gcaatagagagccgagggagtgg

SEQ ID NO: 8891 - DNA, 23 bp, Homo sapiens
  source 1..23: mol_type = genomic DNA
agcttgatcgcacaaggtgcagg

SEQ ID NO: 8892 - DNA, 23 bp, Homo sapiens
  source 1..23: mol_type = genomic DNA
tcaaaaattccccccttcaaggg

SEQ ID NO: 8893 - DNA, 23 bp, Homo sapiens
  source 1..23: mol_type = genomic DNA
ataaggtacatgtaagatagagg

SEQ ID NO: 8894 - DNA, 23 bp, Homo sapiens
  source 1..23: mol_type = genomic DNA
catttaaatcatataaacattgg

SEQ ID NO: 8895 - DNA, 23 bp, Homo sapiens
  source 1..23: mol_type = genomic DNA
ttttgttagaaccccttaagagg

SEQ ID NO: 8896 - DNA, 23 bp, Homo sapiens
  source 1..23: mol_type = genomic DNA
atccccatcccactagagaatgg

SEQ ID NO: 8897 - DNA, 23 bp, Homo sapiens
  source 1..23: mol_type = genomic DNA
tgctactgcttaatcacccatgg

SEQ ID NO: 8898 - DNA, 23 bp, Homo sapiens
  source 1..23: mol_type = genomic DNA
attgaggtaatgtttaagtccgg

SEQ ID NO: 8899 - DNA, 23 bp, Homo sapiens
  source 1..23: mol_type = genomic DNA
ccagacaacatgacttgttaggg

SEQ ID NO: 8900 - DNA, 23 bp, Homo sapiens
  source 1..23: mol_type = genomic DNA
tcatttctagttgttggatgggg

SEQ ID NO: 8901 - DNA, 23 bp, Homo sapiens
  source 1..23: mol_type = genomic DNA
tgtgagctctttaggaagacagg

SEQ ID NO: 8902 - DNA, 23 bp, Homo sapiens
  source 1..23: mol_type = genomic DNA
ctggttgtagagcttaccgctgg

SEQ ID NO: 8903 - DNA, 23 bp, Homo sapiens
  source 1..23: mol_type = genomic DNA
gcatatctaatgagtttccttgg

SEQ ID NO: 8904 - DNA, 23 bp, Homo sapiens
  source 1..23: mol_type = genomic DNA
aatttaaagtccaaaggcctagg

SEQ ID NO: 8905 - DNA, 23 bp, Homo sapiens
  source 1..23: mol_type = genomic DNA
ccaatacttcggaccagctatgg

SEQ ID NO: 8906 - DNA, 23 bp, Homo sapiens
  source 1..23: mol_type = genomic DNA
tggaagtgcaagaagacaactgg

SEQ ID NO: 8907 - DNA, 23 bp, Homo sapiens
  source 1..23: mol_type = genomic DNA
tttctcacattccattaagtagg

SEQ ID NO: 8908 - DNA, 23 bp, Homo sapiens
  source 1..23: mol_type = genomic DNA
atgaacataaaggaattcaatgg

SEQ ID NO: 8909 - DNA, 23 bp, Homo sapiens
  source 1..23: mol_type = genomic DNA
tgataacgtgacattcggttagg

SEQ ID NO: 8910 - DNA, 23 bp, Homo sapiens
  source 1..23: mol_type = genomic DNA
cctctggttcagccttgcaatgg

SEQ ID NO: 8911 - DNA, 23 bp, Homo sapiens
  source 1..23: mol_type = genomic DNA
ggttggggatttttggggtaggg

SEQ ID NO: 8912 - DNA, 23 bp, Homo sapiens
  source 1..23: mol_type = genomic DNA
ttattctaattccactccctcgg

SEQ ID NO: 8913 - DNA, 23 bp, Homo sapiens
  source 1..23: mol_type = genomic DNA
aactcattagatatgctagaagg

SEQ ID NO: 8914 - DNA, 23 bp, Homo sapiens
  source 1..23: mol_type = genomic DNA
atagatgataacgtgacattcgg

SEQ ID NO: 8915 - DNA, 23 bp, Homo sapiens
  source 1..23: mol_type = genomic DNA
ctgtaagtggaggtgaagtcagg

SEQ ID NO: 8916 - DNA, 23 bp, Homo sapiens
  source 1..23: mol_type = genomic DNA
attatttcctgcctaagccttgg

SEQ ID NO: 8917 - DNA, 23 bp, Homo sapiens
  source 1..23: mol_type = genomic DNA
ttattcaaactatcacagatagg

SEQ ID NO: 8918 - DNA, 23 bp, Homo sapiens
  source 1..23: mol_type = genomic DNA
atagttttgatatttctgattgg

SEQ ID NO: 8919 - DNA, 23 bp, Homo sapiens
  source 1..23: mol_type = genomic DNA
ctattattcaagttgcatctagg

SEQ ID NO: 8920 - DNA, 23 bp, Homo sapiens
  source 1..23: mol_type = genomic DNA
ttatcccatgtccctgatgctgg

SEQ ID NO: 8921 - DNA, 23 bp, Homo sapiens
  source 1..23: mol_type = genomic DNA
agtgacattttaatgtttggagg

SEQ ID NO: 8922 - DNA, 23 bp, Homo sapiens
  source 1..23: mol_type = genomic DNA
tcagaatcctttccaacaatggg

SEQ ID NO: 8923 - DNA, 23 bp, Homo sapiens
  source 1..23: mol_type = genomic DNA
cctcacaagtggcaaatacctgg

SEQ ID NO: 8924 - DNA, 23 bp, Homo sapiens
  source 1..23: mol_type = genomic DNA
attgctagattgctaaacttagg

SEQ ID NO: 8925 - DNA, 23 bp, Homo sapiens
  source 1..23: mol_type = genomic DNA
caaaagctataccagctagaagg

SEQ ID NO: 8926 - DNA, 23 bp, Homo sapiens
  source 1..23: mol_type = genomic DNA
gttcagcaaagcttacataatgg

SEQ ID NO: 8927 - DNA, 23 bp, Homo sapiens
  source 1..23: mol_type = genomic DNA
aattagaataaagtagtataggg

SEQ ID NO: 8928 - DNA, 23 bp, Homo sapiens
  source 1..23: mol_type = genomic DNA
gatatattcatatttgtccttgg

SEQ ID NO: 8929 - DNA, 23 bp, Homo sapiens
  source 1..23: mol_type = genomic DNA
cagaaactctgttagaatgtagg

SEQ ID NO: 8930 - DNA, 23 bp, Homo sapiens
  source 1..23: mol_type = genomic DNA
attcgttgcagtaaatactttgg

SEQ ID NO: 8931 - DNA, 23 bp, Homo sapiens
  source 1..23: mol_type = genomic DNA
tctccagtcacaaatgagtttgg

SEQ ID NO: 8932 - DNA, 23 bp, Homo sapiens
  source 1..23: mol_type = genomic DNA
acaattatcagaaaagttgatgg

SEQ ID NO: 8933 - DNA, 23 bp, Homo sapiens
  source 1..23: mol_type = genomic DNA
atcttaatatcgataatagatgg

SEQ ID NO: 8934 - DNA, 23 bp, Homo sapiens
  source 1..23: mol_type = genomic DNA
tctcatgctaactttctgaatgg

SEQ ID NO: 8935 - DNA, 23 bp, Homo sapiens
  source 1..23: mol_type = genomic DNA
tttctctctctacctaagacagg

SEQ ID NO: 8936 - DNA, 23 bp, Homo sapiens
  source 1..23: mol_type = genomic DNA
tagaaattatagcatagctttgg

SEQ ID NO: 8937 - DNA, 23 bp, Homo sapiens
  source 1..23: mol_type = genomic DNA
tatggtgtatcattaaatatagg

SEQ ID NO: 8938 - DNA, 23 bp, Homo sapiens
  source 1..23: mol_type = genomic DNA
aatcaggaagattgatttgaggg

SEQ ID NO: 8939 - DNA, 23 bp, Homo sapiens
  source 1..23: mol_type = genomic DNA
tgataaacgttataaatcttggg

SEQ ID NO: 8940 - DNA, 23 bp, Homo sapiens
  source 1..23: mol_type = genomic DNA
atatggatggaggacaaaaatgg

SEQ ID NO: 8941 - DNA, 23 bp, Homo sapiens
  source 1..23: mol_type = genomic DNA
cttcatttctagttgttggatgg

SEQ ID NO: 8942 - DNA, 23 bp, Homo sapiens
  source 1..23: mol_type = genomic DNA
cagaagatactcgatcaatatgg

SEQ ID NO: 8943 - DNA, 23 bp, Homo sapiens
  source 1..23: mol_type = genomic DNA
ccagtttgcctaaggaataaggg

SEQ ID NO: 8944 - DNA, 23 bp, Homo sapiens
  source 1..23: mol_type = genomic DNA
agattactagtaaacaaaaatgg

SEQ ID NO: 8945 - DNA, 23 bp, Homo sapiens
  source 1..23: mol_type = genomic DNA
cctataggaaggaaggtttaggg

SEQ ID NO: 8946 - DNA, 23 bp, Homo sapiens
  source 1..23: mol_type = genomic DNA
tgtgaaataaaatcacaattagg

SEQ ID NO: 8947 - DNA, 23 bp, Homo sapiens
  source 1..23: mol_type = genomic DNA
atatggaaacactaataatatgg

SEQ ID NO: 8948 - DNA, 23 bp, Homo sapiens
  source 1..23: mol_type = genomic DNA
gtaaagtgcaggtgaattatagg

SEQ ID NO: 8949 - DNA, 23 bp, Homo sapiens
  source 1..23: mol_type = genomic DNA
cattctcatgaccatgataatgg

SEQ ID NO: 8950 - DNA, 23 bp, Homo sapiens
  source 1..23: mol_type = genomic DNA
aattggatgcgaagtataattgg

SEQ ID NO: 8951 - DNA, 23 bp, Homo sapiens
  source 1..23: mol_type = genomic DNA
gctttcaaagaggtcataatagg

SEQ ID NO: 8952 - DNA, 23 bp, Homo sapiens
  source 1..23: mol_type = genomic DNA
ttatcacattagaatttaatagg

SEQ ID NO: 8953 - DNA, 23 bp, Homo sapiens
  source 1..23: mol_type = genomic DNA
ccaaagatggtttaaataaaggg

SEQ ID NO: 8954 - DNA, 23 bp, Homo sapiens
  source 1..23: mol_type = genomic DNA
ttaagaagactaacaagttttgg

SEQ ID NO: 8955 - DNA, 23 bp, Homo sapiens
  source 1..23: mol_type = genomic DNA
aaaattgtactgatgaaaattgg

SEQ ID NO: 8956 - DNA, 23 bp, Homo sapiens
  source 1..23: mol_type = genomic DNA
atacattacctccttttattagg

SEQ ID NO: 8957 - DNA, 23 bp, Homo sapiens
  source 1..23: mol_type = genomic DNA
agtttttgcttccacttaaatgg

SEQ ID NO: 8958 - DNA, 23 bp, Homo sapiens
  source 1..23: mol_type = genomic DNA
ggagtgtaaagcgaaatccaggg

SEQ ID NO: 8959 - DNA, 23 bp, Homo sapiens
  source 1..23: mol_type = genomic DNA
agatcttagaggactcctggggg

SEQ ID NO: 8960 - DNA, 23 bp, Homo sapiens
  source 1..23: mol_type = genomic DNA
agaaatacaattattcacagagg

SEQ ID NO: 8961 - DNA, 23 bp, Homo sapiens
  source 1..23: mol_type = genomic DNA
taaacacaggaataaattagggg

SEQ ID NO: 8962 - DNA, 23 bp, Homo sapiens
  source 1..23: mol_type = genomic DNA
tctacagttttggcacactgagg

SEQ ID NO: 8963 - DNA, 23 bp, Homo sapiens
  source 1..23: mol_type = genomic DNA
aaaccctcattatagcacatggg

SEQ ID NO: 8964 - DNA, 23 bp, Homo sapiens
  source 1..23: mol_type = genomic DNA
atacttaggaaataaagacatgg

SEQ ID NO: 8965 - DNA, 23 bp, Homo sapiens
  source 1..23: mol_type = genomic DNA
ttatgggatctggagcacccagg

SEQ ID NO: 8966 - DNA, 23 bp, Homo sapiens
  source 1..23: mol_type = genomic DNA
tgtactatactgaatgctggagg

SEQ ID NO: 8967 - DNA, 23 bp, Homo sapiens
  source 1..23: mol_type = genomic DNA
aataaataaataatgcctggagg

SEQ ID NO: 8968 - DNA, 23 bp, Homo sapiens
  source 1..23: mol_type = genomic DNA
tagatcttagaggactcctgggg

SEQ ID NO: 8969 - DNA, 23 bp, Homo sapiens
  source 1..23: mol_type = genomic DNA
aagcaattgatcctatatggtgg

SEQ ID NO: 8970 - DNA, 23 bp, Homo sapiens
  source 1..23: mol_type = genomic DNA
actcctaagctaccaaatggggg

SEQ ID NO: 8971 - DNA, 23 bp, Homo sapiens
  source 1..23: mol_type = genomic DNA
tattttgtaatgatgaacagggg

SEQ ID NO: 8972 - DNA, 23 bp, Homo sapiens
  source 1..23: mol_type = genomic DNA
tgggtattcaatgaagtcggagg

SEQ ID NO: 8973 - DNA, 23 bp, Homo sapiens
  source 1..23: mol_type = genomic DNA
tgatgaacaggggtaaacacagg

SEQ ID NO: 8974 - DNA, 23 bp, Homo sapiens
  source 1..23: mol_type = genomic DNA
tcatagatgaatttatacaacgg

SEQ ID NO: 8975 - DNA, 23 bp, Homo sapiens
  source 1..23: mol_type = genomic DNA
tatagagtatatattcacatcgg

SEQ ID NO: 8976 - DNA, 23 bp, Homo sapiens
  source 1..23: mol_type = genomic DNA
aataaaggccttgatcattgggg

SEQ ID NO: 8977 - DNA, 23 bp, Homo sapiens
  source 1..23: mol_type = genomic DNA
tgtgatatattttttcacagggg

SEQ ID NO: 8978 - DNA, 23 bp, Homo sapiens
  source 1..23: mol_type = genomic DNA
taggtgactgagtttctaagagg

SEQ ID NO: 8979 - DNA, 23 bp, Homo sapiens
  source 1..23: mol_type = genomic DNA
taacaagcatcatattccaaggg

SEQ ID NO: 8980 - DNA, 23 bp, Homo sapiens
  source 1..23: mol_type = genomic DNA
ggatttaagcctgatcatggagg

SEQ ID NO: 8981 - DNA, 23 bp, Homo sapiens
  source 1..23: mol_type = genomic DNA
gtggcatgatgctattgaggagg

SEQ ID NO: 8982 - DNA, 23 bp, Homo sapiens
  source 1..23: mol_type = genomic DNA
tgacagcctcacttaataggggg

SEQ ID NO: 8983 - DNA, 23 bp, Homo sapiens
  source 1..23: mol_type = genomic DNA
tgttgaaatgaagatagcaaagg

SEQ ID NO: 8984 - DNA, 23 bp, Homo sapiens
  source 1..23: mol_type = genomic DNA
gaagacactgacctctccaatgg

SEQ ID NO: 8985 - DNA, 23 bp, Homo sapiens
  source 1..23: mol_type = genomic DNA
cccaagagtgagtctttctgggg

SEQ ID NO: 8986 - DNA, 23 bp, Homo sapiens
  source 1..23: mol_type = genomic DNA
gatttaagcctgatcatggaggg

SEQ ID NO: 8987 - DNA, 23 bp, Homo sapiens
  source 1..23: mol_type = genomic DNA
tgtactcaccgtaagtccagagg

SEQ ID NO: 8988 - DNA, 23 bp, Homo sapiens
  source 1..23: mol_type = genomic DNA
catggctaactttctgacaaggg

SEQ ID NO: 8989 - DNA, 23 bp, Homo sapiens
  source 1..23: mol_type = genomic DNA
agggttcagttgagaccaagtgg

SEQ ID NO: 8990 - DNA, 23 bp, Homo sapiens
  source 1..23: mol_type = genomic DNA
taacttccagtgtaggccaaggg

SEQ ID NO: 8991 - DNA, 23 bp, Homo sapiens
  source 1..23: mol_type = genomic DNA
tctgtgataaccatcagatgagg

SEQ ID NO: 8992 - DNA, 23 bp, Homo sapiens
  source 1..23: mol_type = genomic DNA
aatgtgccacatcggaaaagcgg

SEQ ID NO: 8993 - DNA, 23 bp, Homo sapiens
  source 1..23: mol_type = genomic DNA
acaccagagataacatcaccagg

SEQ ID NO: 8994 - DNA, 23 bp, Homo sapiens
  source 1..23: mol_type = genomic DNA
acacagtaacacagatgacatgg

SEQ ID NO: 8995 - DNA, 23 bp, Homo sapiens
  source 1..23: mol_type = genomic DNA
ctatatgcagaatgtatgggtgg

SEQ ID NO: 8996 - DNA, 23 bp, Homo sapiens
  source 1..23: mol_type = genomic DNA
ttgtggatgagaacaacgcaggg

SEQ ID NO: 8997 - DNA, 23 bp, Homo sapiens
  source 1..23: mol_type = genomic DNA
gccacatcggaaaagcggtacgg

SEQ ID NO: 8998 - DNA, 23 bp, Homo sapiens
  source 1..23: mol_type = genomic DNA
gtactcaccgtaagtccagaggg

SEQ ID NO: 8999 - DNA, 23 bp, Homo sapiens
  source 1..23: mol_type = genomic DNA
caatgtctatgaaggatgagtgg

SEQ ID NO: 9000 - DNA, 23 bp, Homo sapiens
  source 1..23: mol_type = genomic DNA
aaaaatgctttctggcagcgagg

SEQ ID NO: 9001 - DNA, 23 bp, Homo sapiens
  source 1..23: mol_type = genomic DNA
tttgtggatgagaacaacgcagg

SEQ ID NO: 9002 - DNA, 23 bp, Homo sapiens
  source 1..23: mol_type = genomic DNA
gttcaaactacctcatctgatgg

SEQ ID NO: 9003 - DNA, 23 bp, Homo sapiens
  source 1..23: mol_type = genomic DNA
caataataaatagtgtaacaggg

SEQ ID NO: 9004 - DNA, 23 bp, Homo sapiens
  source 1..23: mol_type = genomic DNA
aggctcctgctcaattcatgagg

SEQ ID NO: 9005 - DNA, 23 bp, Homo sapiens
  source 1..23: mol_type = genomic DNA
agtttggtgatgcagcagatggg

SEQ ID NO: 9006 - DNA, 23 bp, Homo sapiens
  source 1..23: mol_type = genomic DNA
ttctgatgttcagtgttacgtgg

SEQ ID NO: 9007 - DNA, 23 bp, Homo sapiens
  source 1..23: mol_type = genomic DNA
ttattttgtaatgatgaacaggg

SEQ ID NO: 9008 - DNA, 23 bp, Homo sapiens
  source 1..23: mol_type = genomic DNA
tcatttccccctattaagtgagg

SEQ ID NO: 9009 - DNA, 23 bp, Homo sapiens
  source 1..23: mol_type = genomic DNA
gctgttcatcatgaattggaagg

SEQ ID NO: 9010 - DNA, 23 bp, Homo sapiens
  source 1..23: mol_type = genomic DNA
tccttcatagacattgctgtagg

SEQ ID NO: 9011 - DNA, 23 bp, Homo sapiens
  source 1..23: mol_type = genomic DNA
gttttccccaaacccccacatgg

SEQ ID NO: 9012 - DNA, 23 bp, Homo sapiens
  source 1..23: mol_type = genomic DNA
gcacccatgtgctataatgaggg

SEQ ID NO: 9013 - DNA, 23 bp, Homo sapiens
  source 1..23: mol_type = genomic DNA
cagtgcttagatttggtaggtgg

SEQ ID NO: 9014 - DNA, 23 bp, Homo sapiens
  source 1..23: mol_type = genomic DNA
gcatgggcagacatatgtcatgg

SEQ ID NO: 9015 - DNA, 23 bp, Homo sapiens
  source 1..23: mol_type = genomic DNA
aaggatttccctcgaaggagtgg

SEQ ID NO: 9016 - DNA, 23 bp, Homo sapiens
  source 1..23: mol_type = genomic DNA
gagaagcaaatgtgccacatcgg

SEQ ID NO: 9017 - DNA, 23 bp, Homo sapiens
  source 1..23: mol_type = genomic DNA
tgtgcatagatgcataaccttgg

SEQ ID NO: 9018 - DNA, 23 bp, Homo sapiens
  source 1..23: mol_type = genomic DNA
agctaagtacggataacctaggg

SEQ ID NO: 9019 - DNA, 23 bp, Homo sapiens
  source 1..23: mol_type = genomic DNA
tattcaaactctatggcaggtgg

SEQ ID NO: 9020 - DNA, 23 bp, Homo sapiens
  source 1..23: mol_type = genomic DNA
aggaggctgctctagaaccaagg

SEQ ID NO: 9021 - DNA, 23 bp, Homo sapiens
  source 1..23: mol_type = genomic DNA
gaggtcagtgtcttctcatgagg

SEQ ID NO: 9022 - DNA, 23 bp, Homo sapiens
  source 1..23: mol_type = genomic DNA
ctgggggtcaataatagtaaggg

SEQ ID NO: 9023 - DNA, 23 bp, Homo sapiens
  source 1..23: mol_type = genomic DNA
gggtcaataatagtaagggctgg

SEQ ID NO: 9024 - DNA, 23 bp, Homo sapiens
  source 1..23: mol_type = genomic DNA
acgtaacactgaacatcagaagg

SEQ ID NO: 9025 - DNA, 23 bp, Homo sapiens
  source 1..23: mol_type = genomic DNA
tgttgggtattcaatgaagtcgg

SEQ ID NO: 9026 - DNA, 23 bp, Homo sapiens
  source 1..23: mol_type = genomic DNA
taatctttgtgcaatcaggaagg

SEQ ID NO: 9027 - DNA, 23 bp, Homo sapiens
  source 1..23: mol_type = genomic DNA
catatcattcaggccagcaaggg

SEQ ID NO: 9028 - DNA, 23 bp, Homo sapiens
  source 1..23: mol_type = genomic DNA
actcactctcatatttagcaagg

SEQ ID NO: 9029 - DNA, 23 bp, Homo sapiens
  source 1..23: mol_type = genomic DNA
aagggcataaagaggccagaagg

SEQ ID NO: 9030 - DNA, 23 bp, Homo sapiens
  source 1..23: mol_type = genomic DNA
ggatttcttgggaaatgatgggg

SEQ ID NO: 9031 - DNA, 23 bp, Homo sapiens
  source 1..23: mol_type = genomic DNA
ccatagctgagtctatgctatgg

SEQ ID NO: 9032 - DNA, 23 bp, Homo sapiens
  source 1..23: mol_type = genomic DNA
gacagtgccataggatcaagtgg

SEQ ID NO: 9033 - DNA, 23 bp, Homo sapiens
  source 1..23: mol_type = genomic DNA
tagagcctagcccagtgtagagg

SEQ ID NO: 9034 - DNA, 23 bp, Homo sapiens
  source 1..23: mol_type = genomic DNA
tagctaagtacggataacctagg

SEQ ID NO: 9035 - DNA, 23 bp, Homo sapiens
  source 1..23: mol_type = genomic DNA
gcacgtttgccagaaagtaacgg

SEQ ID NO: 9036 - DNA, 23 bp, Homo sapiens
  source 1..23: mol_type = genomic DNA
gtaacttccagtgtaggccaagg

SEQ ID NO: 9037 - DNA, 23 bp, Homo sapiens
  source 1..23: mol_type = genomic DNA
ttttttcacaggggaatgagagg

SEQ ID NO: 9038 - DNA, 23 bp, Homo sapiens
  source 1..23: mol_type = genomic DNA
gtgacagcctcacttaatagggg

SEQ ID NO: 9039 - DNA, 23 bp, Homo sapiens
  source 1..23: mol_type = genomic DNA
tggaagggaacttattaggatgg

SEQ ID NO: 9040 - DNA, 23 bp, Homo sapiens
  source 1..23: mol_type = genomic DNA
ttatcacagaaaaatttgcatgg

SEQ ID NO: 9041 - DNA, 23 bp, Homo sapiens
  source 1..23: mol_type = genomic DNA
ctatattctgacttcagtgaagg

SEQ ID NO: 9042 - DNA, 23 bp, Homo sapiens
  source 1..23: mol_type = genomic DNA
gggtatcctgtaaattcgatggg

SEQ ID NO: 9043 - DNA, 23 bp, Homo sapiens
  source 1..23: mol_type = genomic DNA
ttattgggagagagttggggtgg

SEQ ID NO: 9044 - DNA, 23 bp, Homo sapiens
  source 1..23: mol_type = genomic DNA
gcatcatgccactccttcgaggg

SEQ ID NO: 9045 - DNA, 23 bp, Homo sapiens
  source 1..23: mol_type = genomic DNA
tataagctctggaatgtcaaagg

SEQ ID NO: 9046 - DNA, 23 bp, Homo sapiens
  source 1..23: mol_type = genomic DNA
ttaatggttatgatggtaagggg

SEQ ID NO: 9047 - DNA, 23 bp, Homo sapiens
  source 1..23: mol_type = genomic DNA
aatgcttctcaatagcctgaagg

SEQ ID NO: 9048 - DNA, 23 bp, Homo sapiens
  source 1..23: mol_type = genomic DNA
aatggtaatgaaatttaactagg

SEQ ID NO: 9049 - DNA, 23 bp, Homo sapiens
  source 1..23: mol_type = genomic DNA
agagcagagaaacaggaggccgg

SEQ ID NO: 9050 - DNA, 23 bp, Homo sapiens
  source 1..23: mol_type = genomic DNA
attcttgccatattgatcaaggg

SEQ ID NO: 9051 - DNA, 23 bp, Homo sapiens
  source 1..23: mol_type = genomic DNA
aatgttagcatagctaagtacgg

SEQ ID NO: 9052 - DNA, 23 bp, Homo sapiens
  source 1..23: mol_type = genomic DNA
ccatagcatagactcagctatgg

SEQ ID NO: 9053 - DNA, 23 bp, Homo sapiens
  source 1..23: mol_type = genomic DNA
tatcacagaaaaatttgcatggg

SEQ ID NO: 9054 - DNA, 23 bp, Homo sapiens
  source 1..23: mol_type = genomic DNA
gcgttctgtgttgtttctagggg

SEQ ID NO: 9055 - DNA, 23 bp, Homo sapiens
  source 1..23: mol_type = genomic DNA
tagctgtaagacaaaagctatgg

SEQ ID NO: 9056 - DNA, 23 bp, Homo sapiens
  source 1..23: mol_type = genomic DNA
tgattatcctcctgctcagacgg

SEQ ID NO: 9057 - DNA, 23 bp, Homo sapiens
  source 1..23: mol_type = genomic DNA
gttatgaacagaatttctagtgg

SEQ ID NO: 9058 - DNA, 23 bp, Homo sapiens
  source 1..23: mol_type = genomic DNA
ctacatatggaaaaggacatagg

SEQ ID NO: 9059 - DNA, 23 bp, Homo sapiens
  source 1..23: mol_type = genomic DNA
aaatcagaacaactaagtaatgg

SEQ ID NO: 9060 - DNA, 23 bp, Homo sapiens
  source 1..23: mol_type = genomic DNA
agtcagaatgtattagatgaggg

SEQ ID NO: 9061 - DNA, 23 bp, Homo sapiens
  source 1..23: mol_type = genomic DNA
gcatggattgtagaaagagtagg

SEQ ID NO: 9062 - DNA, 23 bp, Homo sapiens
  source 1..23: mol_type = genomic DNA
gcctttctaacttacaaatgtgg

SEQ ID NO: 9063 - DNA, 23 bp, Homo sapiens
  source 1..23: mol_type = genomic DNA
aatctcagtgtaagaatgcaagg

SEQ ID NO: 9064 - DNA, 23 bp, Homo sapiens
  source 1..23: mol_type = genomic DNA
ttaaattctgctcagatcagagg

SEQ ID NO: 9065 - DNA, 23 bp, Homo sapiens
  source 1..23: mol_type = genomic DNA
gattgtagaaagagtaggaaagg

SEQ ID NO: 9066 - DNA, 23 bp, Homo sapiens
  source 1..23: mol_type = genomic DNA
tttgttacataacacaagagtgg

SEQ ID NO: 9067 - DNA, 23 bp, Homo sapiens
  source 1..23: mol_type = genomic DNA
tatagtgttctaaaatgttgagg

SEQ ID NO: 9068 - DNA, 23 bp, Homo sapiens
  source 1..23: mol_type = genomic DNA
gtcatagcagaaaattggcttgg

SEQ ID NO: 9069 - DNA, 23 bp, Homo sapiens
  source 1..23: mol_type = genomic DNA
tcctttaaacaccattggagagg

SEQ ID NO: 9070 - DNA, 23 bp, Homo sapiens
  source 1..23: mol_type = genomic DNA
tcaaccttatattttaacacggg

SEQ ID NO: 9071 - DNA, 23 bp, Homo sapiens
  source 1..23: mol_type = genomic DNA
ttaattcaagacatctggacagg

SEQ ID NO: 9072 - DNA, 23 bp, Homo sapiens
  source 1..23: mol_type = genomic DNA
gcaaatctactccagcactctgg

SEQ ID NO: 9073 - DNA, 23 bp, Homo sapiens
  source 1..23: mol_type = genomic DNA
ccttctaccacctctacactggg

SEQ ID NO: 9074 - DNA, 23 bp, Homo sapiens
  source 1..23: mol_type = genomic DNA
acttccttcatagctgccctagg

SEQ ID NO: 9075 - DNA, 23 bp, Homo sapiens
  source 1..23: mol_type = genomic DNA
atataggcttatgataagaatgg

SEQ ID NO: 9076 - DNA, 23 bp, Homo sapiens
  source 1..23: mol_type = genomic DNA
aaacatagagtaagcagtagtgg

SEQ ID NO: 9077 - DNA, 23 bp, Homo sapiens
  source 1..23: mol_type = genomic DNA
ttaacaagcatcatattccaagg

SEQ ID NO: 9078 - DNA, 23 bp, Homo sapiens
  source 1..23: mol_type = genomic DNA
ataaaactctttttgccatgagg

SEQ ID NO: 9079 - DNA, 23 bp, Homo sapiens
  source 1..23: mol_type = genomic DNA
aatgttaagaaaggtacagcagg

SEQ ID NO: 9080 - DNA, 23 bp, Homo sapiens
  source 1..23: mol_type = genomic DNA
ataaatagtgatgctcaaaaggg

SEQ ID NO: 9081 - DNA, 23 bp, Homo sapiens
  source 1..23: mol_type = genomic DNA
atagaaaacaaaaacaaggatgg

SEQ ID NO: 9082 - DNA, 23 bp, Homo sapiens
  source 1..23: mol_type = genomic DNA
gtagaaggaatggggcatagagg

SEQ ID NO: 9083 - DNA, 23 bp, Homo sapiens
  source 1..23: mol_type = genomic DNA
gtacaaggaaataaaggagtggg

SEQ ID NO: 9084 - DNA, 23 bp, Homo sapiens
  source 1..23: mol_type = genomic DNA
ctgcatgtaacttccagtgtagg

SEQ ID NO: 9085 - DNA, 23 bp, Homo sapiens
  source 1..23: mol_type = genomic DNA
gcttcgaaaataagaagcctagg

SEQ ID NO: 9086 - DNA, 23 bp, Homo sapiens
  source 1..23: mol_type = genomic DNA
catggaattatgtaaggctaggg

SEQ ID NO: 9087 - DNA, 23 bp, Homo sapiens
  source 1..23: mol_type = genomic DNA
gtaaaataagaatatgggcatgg

SEQ ID NO: 9088 - DNA, 23 bp, Homo sapiens
  source 1..23: mol_type = genomic DNA
aagaagtgtaagaaaaacattgg

SEQ ID NO: 9089 - DNA, 23 bp, Homo sapiens
  source 1..23: mol_type = genomic DNA
agatgggagttgcttttgtgggg

SEQ ID NO: 9090 - DNA, 23 bp, Homo sapiens
  source 1..23: mol_type = genomic DNA
tttcttatccaaaattatgaggg

SEQ ID NO: 9091 - DNA, 23 bp, Homo sapiens
  source 1..23: mol_type = genomic DNA
ctttcattaagcacttatgaggg

SEQ ID NO: 9092 - DNA, 23 bp, Homo sapiens
  source 1..23: mol_type = genomic DNA
gtacagtgcttagatttggtagg

SEQ ID NO: 9093 - DNA, 23 bp, Homo sapiens
  source 1..23: mol_type = genomic DNA
tgacatttgacaacaaacattgg

SEQ ID NO: 9094 - DNA, 23 bp, Homo sapiens
  source 1..23: mol_type = genomic DNA
acacatgtaaaataatacttagg

SEQ ID NO: 9095 - DNA, 23 bp, Homo sapiens
  source 1..23: mol_type = genomic DNA
aatctaacacaagaaccctctgg

SEQ ID NO: 9096 - DNA, 23 bp, Homo sapiens
  source 1..23: mol_type = genomic DNA
cttggtctcaactgaaccctagg

SEQ ID NO: 9097 - DNA, 23 bp, Homo sapiens
  source 1..23: mol_type = genomic DNA
agtaccggcaattagctgttggg

SEQ ID NO: 9098 - DNA, 23 bp, Homo sapiens
  source 1..23: mol_type = genomic DNA
atgcttctcaatagcctgaaggg

SEQ ID NO: 9099 - DNA, 23 bp, Homo sapiens
  source 1..23: mol_type = genomic DNA
ttactattaatgaaagctcaagg

SEQ ID NO: 9100 - DNA, 23 bp, Homo sapiens
  source 1..23: mol_type = genomic DNA
gatgagtggtttctcccaaatgg

SEQ ID NO: 9101 - DNA, 23 bp, Homo sapiens
  source 1..23: mol_type = genomic DNA
tgatgttgacaaagaatgaaagg

SEQ ID NO: 9102 - DNA, 23 bp, Homo sapiens
  source 1..23: mol_type = genomic DNA
tacactacattaataaaagtagg

SEQ ID NO: 9103 - DNA, 23 bp, Homo sapiens
  source 1..23: mol_type = genomic DNA
ccatttggtagcttaggagttgg

SEQ ID NO: 9104 - DNA, 23 bp, Homo sapiens
  source 1..23: mol_type = genomic DNA
tttaatggttatgatggtaaggg

SEQ ID NO: 9105 - DNA, 23 bp, Homo sapiens
  source 1..23: mol_type = genomic DNA
ttaatgttacatctcactgttgg

SEQ ID NO: 9106 - DNA, 23 bp, Homo sapiens
  source 1..23: mol_type = genomic DNA
ctctctctctctcaactggaggg

SEQ ID NO: 9107 - DNA, 23 bp, Homo sapiens
  source 1..23: mol_type = genomic DNA
ctaatagacatcataagtgcagg

SEQ ID NO: 9108 - DNA, 23 bp, Homo sapiens
  source 1..23: mol_type = genomic DNA
tttcctgatggcatagcagacgg

SEQ ID NO: 9109 - DNA, 23 bp, Homo sapiens
  source 1..23: mol_type = genomic DNA
acttatgatgtctattagaaagg

SEQ ID NO: 9110 - DNA, 23 bp, Homo sapiens
  source 1..23: mol_type = genomic DNA
gaatatcaaaagcttttctaggg

SEQ ID NO: 9111 - DNA, 23 bp, Homo sapiens
  source 1..23: mol_type = genomic DNA
gagaagacaaatgttaagaaagg

SEQ ID NO: 9112 - DNA, 23 bp, Homo sapiens
  source 1..23: mol_type = genomic DNA
gctctctctctctcaactggagg

SEQ ID NO: 9113 - DNA, 23 bp, Homo sapiens
  source 1..23: mol_type = genomic DNA
aggccggaaaacatgttaagagg

SEQ ID NO: 9114 - DNA, 23 bp, Homo sapiens
  source 1..23: mol_type = genomic DNA
ctagatcttagaggactcctggg

SEQ ID NO: 9115 - DNA, 23 bp, Homo sapiens
  source 1..23: mol_type = genomic DNA
tatgaactatgcaacgttcaggg

SEQ ID NO: 9116 - DNA, 23 bp, Homo sapiens
  source 1..23: mol_type = genomic DNA
aagtttggtgatgcagcagatgg

SEQ ID NO: 9117 - DNA, 23 bp, Homo sapiens
  source 1..23: mol_type = genomic DNA
cacttatgagggcaaaagacagg

SEQ ID NO: 9118 - DNA, 23 bp, Homo sapiens
  source 1..23: mol_type = genomic DNA
gttaagtttgacagtgccatagg

SEQ ID NO: 9119 - DNA, 23 bp, Homo sapiens
  source 1..23: mol_type = genomic DNA
gcttctgtatattctgtgacagg

SEQ ID NO: 9120 - DNA, 23 bp, Homo sapiens
  source 1..23: mol_type = genomic DNA
agaggaaaaagagactataaggg

SEQ ID NO: 9121 - DNA, 23 bp, Homo sapiens
  source 1..23: mol_type = genomic DNA
atctagacattcccaatcctggg

SEQ ID NO: 9122 - DNA, 23 bp, Homo sapiens
  source 1..23: mol_type = genomic DNA
ttaaagaactacaggagtaatgg

SEQ ID NO: 9123 - DNA, 23 bp, Homo sapiens
  source 1..23: mol_type = genomic DNA
ccccagaaagactcactcttggg

SEQ ID NO: 9124 - DNA, 23 bp, Homo sapiens
  source 1..23: mol_type = genomic DNA
gacagtccctaatcacgaaatgg

SEQ ID NO: 9125 - DNA, 23 bp, Homo sapiens
  source 1..23: mol_type = genomic DNA
taagagttggattcattccatgg

SEQ ID NO: 9126 - DNA, 23 bp, Homo sapiens
  source 1..23: mol_type = genomic DNA
tttatttaaagggcataaagagg

SEQ ID NO: 9127 - DNA, 23 bp, Homo sapiens
  source 1..23: mol_type = genomic DNA
aagagtggagaaacaagtttggg

SEQ ID NO: 9128 - DNA, 23 bp, Homo sapiens
  source 1..23: mol_type = genomic DNA
tcatctgtgttactgtgtatagg

SEQ ID NO: 9129 - DNA, 23 bp, Homo sapiens
  source 1..23: mol_type = genomic DNA
ctattaagatatttgcatatggg

SEQ ID NO: 9130 - DNA, 23 bp, Homo sapiens
  source 1..23: mol_type = genomic DNA
ataaatagtgtaacagggtaagg

SEQ ID NO: 9131 - DNA, 23 bp, Homo sapiens
  source 1..23: mol_type = genomic DNA
tcataacagaaatattaaacagg

SEQ ID NO: 9132 - DNA, 23 bp, Homo sapiens
  source 1..23: mol_type = genomic DNA
gtgctcaaatagttaaaagtagg

SEQ ID NO: 9133 - DNA, 23 bp, Homo sapiens
  source 1..23: mol_type = genomic DNA
ctatgtccttttccatatgtagg

SEQ ID NO: 9134 - DNA, 23 bp, Homo sapiens
  source 1..23: mol_type = genomic DNA
aatacccaacagctaattgccgg

SEQ ID NO: 9135 - DNA, 23 bp, Homo sapiens
  source 1..23: mol_type = genomic DNA
aggaaaggcaagagaattgaggg

SEQ ID NO: 9136 - DNA, 23 bp, Homo sapiens
  source 1..23: mol_type = genomic DNA
gtagaggtggtagaaggaatggg

SEQ ID NO: 9137 - DNA, 23 bp, Homo sapiens
  source 1..23: mol_type = genomic DNA
gctctagtctctaggatctcagg

SEQ ID NO: 9138 - DNA, 23 bp, Homo sapiens
  source 1..23: mol_type = genomic DNA
agtctttcagaacccccatttgg

SEQ ID NO: 9139 - DNA, 23 bp, Homo sapiens
  source 1..23: mol_type = genomic DNA
ttaaaaaatacagcatagctagg

SEQ ID NO: 9140 - DNA, 23 bp, Homo sapiens
  source 1..23: mol_type = genomic DNA
gtggccagtgtatcataagttgg

SEQ ID NO: 9141 - DNA, 23 bp, Homo sapiens
  source 1..23: mol_type = genomic DNA
tgaaatgatttgctctcaaatgg

SEQ ID NO: 9142 - DNA, 23 bp, Homo sapiens
  source 1..23: mol_type = genomic DNA
gtaaccaagaaaagttcaattgg

SEQ ID NO: 9143 - DNA, 23 bp, Homo sapiens
  source 1..23: mol_type = genomic DNA
gggaatgcaacagagatagaagg

SEQ ID NO: 9144 - DNA, 23 bp, Homo sapiens
  source 1..23: mol_type = genomic DNA
ctttaccttacctaattgccagg

SEQ ID NO: 9145 - DNA, 23 bp, Homo sapiens
  source 1..23: mol_type = genomic DNA
catttttgtgtacttctctaggg

SEQ ID NO: 9146 - DNA, 23 bp, Homo sapiens
  source 1..23: mol_type = genomic DNA
ccaactcctaagctaccaaatgg

SEQ ID NO: 9147 - DNA, 23 bp, Homo sapiens
  source 1..23: mol_type = genomic DNA
ttaaataaataaataatgcctgg

SEQ ID NO: 9148 - DNA, 23 bp, Homo sapiens
  source 1..23: mol_type = genomic DNA
cctggaagacagacttcataggg

SEQ ID NO: 9149 - DNA, 23 bp, Homo sapiens
  source 1..23: mol_type = genomic DNA
gactcagctatggaaagaacagg

SEQ ID NO: 9150 - DNA, 23 bp, Homo sapiens
  source 1..23: mol_type = genomic DNA
gagcacctgaagaagaagttagg

SEQ ID NO: 9151 - DNA, 23 bp, Homo sapiens
  source 1..23: mol_type = genomic DNA
ttacctggtgatgttatctctgg

SEQ ID NO: 9152 - DNA, 23 bp, Homo sapiens
  source 1..23: mol_type = genomic DNA
aatttcatagtcattagaaatgg

SEQ ID NO: 9153 - DNA, 23 bp, Homo sapiens
  source 1..23: mol_type = genomic DNA
gtctaaatctctcaaaagaatgg

SEQ ID NO: 9154 - DNA, 23 bp, Homo sapiens
  source 1..23: mol_type = genomic DNA
ttaaaagactcaataagagttgg

SEQ ID NO: 9155 - DNA, 23 bp, Homo sapiens
  source 1..23: mol_type = genomic DNA
gataatttcaattaaaacgttgg

SEQ ID NO: 9156 - DNA, 23 bp, Homo sapiens
  source 1..23: mol_type = genomic DNA
attgggaatgtctagatagaagg

SEQ ID NO: 9157 - DNA, 23 bp, Homo sapiens
  source 1..23: mol_type = genomic DNA
gtaactatatgcagaatgtatgg

SEQ ID NO: 9158 - DNA, 23 bp, Homo sapiens
  source 1..23: mol_type = genomic DNA
tcttttggagctcttctccctgg

SEQ ID NO: 9159 - DNA, 23 bp, Homo sapiens
  source 1..23: mol_type = genomic DNA
tgacaacaaaaattgtaaacagg

SEQ ID NO: 9160 - DNA, 23 bp, Homo sapiens
  source 1..23: mol_type = genomic DNA
tttacatgtgttctaagaaaggg

SEQ ID NO: 9161 - DNA, 23 bp, Homo sapiens
  source 1..23: mol_type = genomic DNA
cctgggggtcaataatagtaagg

SEQ ID NO: 9162 - DNA, 23 bp, Homo sapiens
  source 1..23: mol_type = genomic DNA
ggctcttgtccatgtcaagttgg

SEQ ID NO: 9163 - DNA, 23 bp, Homo sapiens
  source 1..23: mol_type = genomic DNA
ttttttcctttaaacaccattgg

SEQ ID NO: 9164 - DNA, 23 bp, Homo sapiens
  source 1..23: mol_type = genomic DNA
aactcagtaaattagaaataggg

SEQ ID NO: 9165 - DNA, 23 bp, Homo sapiens
  source 1..23: mol_type = genomic DNA
cctgtagttctttaaaatagagg

SEQ ID NO: 9166 - DNA, 23 bp, Homo sapiens
  source 1..23: mol_type = genomic DNA
gtaacagggtaaggtcttatggg

SEQ ID NO: 9167 - DNA, 23 bp, Homo sapiens
  source 1..23: mol_type = genomic DNA
attattttgacataaatgattgg

SEQ ID NO: 9168 - DNA, 23 bp, Homo sapiens
  source 1..23: mol_type = genomic DNA
ttacatgtaaaaatgaaaactgg

SEQ ID NO: 9169 - DNA, 23 bp, Homo sapiens
  source 1..23: mol_type = genomic DNA
gggcaattgggacttgagattgg

SEQ ID NO: 9170 - DNA, 23 bp, Homo sapiens
  source 1..23: mol_type = genomic DNA
attattctggttttatcctaggg

SEQ ID NO: 9171 - DNA, 23 bp, Homo sapiens
  source 1..23: mol_type = genomic DNA
gttttaggttaataaaaaatggg

SEQ ID NO: 9172 - DNA, 23 bp, Homo sapiens
  source 1..23: mol_type = genomic DNA
ataatttcaattaaaacgttggg

SEQ ID NO: 9173 - DNA, 23 bp, Homo sapiens
  source 1..23: mol_type = genomic DNA
tacaagacatcgtaaatgattgg

SEQ ID NO: 9174 - DNA, 23 bp, Homo sapiens
  source 1..23: mol_type = genomic DNA
acttcaacttccaaaagtattgg

SEQ ID NO: 9175 - DNA, 23 bp, Homo sapiens
  source 1..23: mol_type = genomic DNA
tggaatgtcaaaggcatgatagg

SEQ ID NO: 9176 - DNA, 23 bp, Homo sapiens
  source 1..23: mol_type = genomic DNA
cccagtgtagaggtggtagaagg

SEQ ID NO: 9177 - DNA, 23 bp, Homo sapiens
  source 1..23: mol_type = genomic DNA
catctcacaactctctttagtgg

SEQ ID NO: 9178 - DNA, 23 bp, Homo sapiens
  source 1..23: mol_type = genomic DNA
ggatcaagtggtgcttttagtgg

SEQ ID NO: 9179 - DNA, 23 bp, Homo sapiens
  source 1..23: mol_type = genomic DNA
tcttaggtattcaaactctatgg

SEQ ID NO: 9180 - DNA, 23 bp, Homo sapiens
  source 1..23: mol_type = genomic DNA
tgacattccagagcttataatgg

SEQ ID NO: 9181 - DNA, 23 bp, Homo sapiens
  source 1..23: mol_type = genomic DNA
gcttgtacagtgcttagatttgg

SEQ ID NO: 9182 - DNA, 23 bp, Homo sapiens
  source 1..23: mol_type = genomic DNA
gccacatttgtaagttagaaagg

SEQ ID NO: 9183 - DNA, 23 bp, Homo sapiens
  source 1..23: mol_type = genomic DNA
tgtgacagcctcacttaataggg

SEQ ID NO: 9184 - DNA, 23 bp, Homo sapiens
  source 1..23: mol_type = genomic DNA
tcaagactctgtcatcttagagg

SEQ ID NO: 9185 - DNA, 23 bp, Homo sapiens
  source 1..23: mol_type = genomic DNA
catttgaagtctgagaaaatagg

SEQ ID NO: 9186 - DNA, 23 bp, Homo sapiens
  source 1..23: mol_type = genomic DNA
gtatttattgagtccccttcagg

SEQ ID NO: 9187 - DNA, 23 bp, Homo sapiens
  source 1..23: mol_type = genomic DNA
taaataagtctctagttaaaggg

SEQ ID NO: 9188 - DNA, 23 bp, Homo sapiens
  source 1..23: mol_type = genomic DNA
ggtagtactctcttattcattgg

SEQ ID NO: 9189 - DNA, 23 bp, Homo sapiens
  source 1..23: mol_type = genomic DNA
gtaaacacaggaataaattaggg

SEQ ID NO: 9190 - DNA, 23 bp, Homo sapiens
  source 1..23: mol_type = genomic DNA
atataaacccttgatcaatatgg

SEQ ID NO: 9191 - DNA, 23 bp, Homo sapiens
  source 1..23: mol_type = genomic DNA
cttgttaatagaattcttatggg

SEQ ID NO: 9192 - DNA, 23 bp, Homo sapiens
  source 1..23: mol_type = genomic DNA
tgagcgtcatagcagaaaattgg

SEQ ID NO: 9193 - DNA, 23 bp, Homo sapiens
  source 1..23: mol_type = genomic DNA
ttattcatggattcctagtttgg

SEQ ID NO: 9194 - DNA, 23 bp, Homo sapiens
  source 1..23: mol_type = genomic DNA
tcttaaatgctagatcttagagg

SEQ ID NO: 9195 - DNA, 23 bp, Homo sapiens
  source 1..23: mol_type = genomic DNA
tttccatgaagatctatttacgg

SEQ ID NO: 9196 - DNA, 23 bp, Homo sapiens
  source 1..23: mol_type = genomic DNA
agattggtaattaagaaaatagg

SEQ ID NO: 9197 - DNA, 23 bp, Homo sapiens
  source 1..23: mol_type = genomic DNA
gtttaatttctcatgaataatgg

SEQ ID NO: 9198 - DNA, 23 bp, Homo sapiens
  source 1..23: mol_type = genomic DNA
gcttctcccatcgaatttacagg

SEQ ID NO: 9199 - DNA, 23 bp, Homo sapiens
  source 1..23: mol_type = genomic DNA
ttaaatgtgtccaatacttttgg

SEQ ID NO: 9200 - DNA, 23 bp, Homo sapiens
  source 1..23: mol_type = genomic DNA
tatacaacggagatttatattgg

SEQ ID NO: 9201 - DNA, 23 bp, Homo sapiens
  source 1..23: mol_type = genomic DNA
ttaatgtagtgtaaataaattgg

SEQ ID NO: 9202 - DNA, 23 bp, Homo sapiens
  source 1..23: mol_type = genomic DNA
ttttgccatgaggccaaaaatgg

SEQ ID NO: 9203 - DNA, 23 bp, Homo sapiens
  source 1..23: mol_type = genomic DNA
agtgcttaatgaaagtttaatgg

SEQ ID NO: 9204 - DNA, 23 bp, Homo sapiens
  source 1..23: mol_type = genomic DNA
ggacatttcccgttactttctgg

SEQ ID NO: 9205 - DNA, 23 bp, Homo sapiens
  source 1..23: mol_type = genomic DNA
gtataacatatggtacagggcgg

SEQ ID NO: 9206 - DNA, 23 bp, Homo sapiens
  source 1..23: mol_type = genomic DNA
ccatgctcagatccacaacgggg

SEQ ID NO: 9207 - DNA, 23 bp, Homo sapiens
  source 1..23: mol_type = genomic DNA
agatgtattgaaggtctgtgtgg

SEQ ID NO: 9208 - DNA, 23 bp, Homo sapiens
  source 1..23: mol_type = genomic DNA
cccaccatacaaaattacagggg

SEQ ID NO: 9209 - DNA, 23 bp, Homo sapiens
  source 1..23: mol_type = genomic DNA
ggaatgcttagaaagagatgtgg

SEQ ID NO: 9210 - DNA, 23 bp, Homo sapiens
  source 1..23: mol_type = genomic DNA
cacacaatgcatcagcaacgggg

SEQ ID NO: 9211 - DNA, 23 bp, Homo sapiens
  source 1..23: mol_type = genomic DNA
caataaacagtatcacgcagagg

SEQ ID NO: 9212 - DNA, 23 bp, Homo sapiens
  source 1..23: mol_type = genomic DNA
atgtgtattaacccacctagagg

SEQ ID NO: 9213 - DNA, 23 bp, Homo sapiens
  source 1..23: mol_type = genomic DNA
tttagctgtcacttccaaagggg

SEQ ID NO: 9214 - DNA, 23 bp, Homo sapiens
  source 1..23: mol_type = genomic DNA
caaggagctcagagtctgcgagg

SEQ ID NO: 9215 - DNA, 23 bp, Homo sapiens
  source 1..23: mol_type = genomic DNA
agtcgtctgtttaaacccggtgg

SEQ ID NO: 9216 - DNA, 23 bp, Homo sapiens
  source 1..23: mol_type = genomic DNA
tgctcagatccacaacggggagg

SEQ ID NO: 9217 - DNA, 23 bp, Homo sapiens
  source 1..23: mol_type = genomic DNA
gtgtaacatgagtatcacacagg

SEQ ID NO: 9218 - DNA, 23 bp, Homo sapiens
  source 1..23: mol_type = genomic DNA
gaaggcagtagccattaaagggg

SEQ ID NO: 9219 - DNA, 23 bp, Homo sapiens
  source 1..23: mol_type = genomic DNA
tctgttgaaatgccatccagagg

SEQ ID NO: 9220 - DNA, 23 bp, Homo sapiens
  source 1..23: mol_type = genomic DNA
aggtttatagctatgtcctgagg

SEQ ID NO: 9221 - DNA, 23 bp, Homo sapiens
  source 1..23: mol_type = genomic DNA
gatacaatagtaactaactgcgg

SEQ ID NO: 9222 - DNA, 23 bp, Homo sapiens
  source 1..23: mol_type = genomic DNA
actgtataacatatggtacaggg

SEQ ID NO: 9223 - DNA, 23 bp, Homo sapiens
  source 1..23: mol_type = genomic DNA
caggcgtatatccactaaggcgg

SEQ ID NO: 9224 - DNA, 23 bp, Homo sapiens
  source 1..23: mol_type = genomic DNA
aacgcaacagatgattcctgagg

SEQ ID NO: 9225 - DNA, 23 bp, Homo sapiens
  source 1..23: mol_type = genomic DNA
gagttggcatgagacatagaggg

SEQ ID NO: 9226 - DNA, 23 bp, Homo sapiens
  source 1..23: mol_type = genomic DNA
gaaaatctgacaagcctgggagg

SEQ ID NO: 9227 - DNA, 23 bp, Homo sapiens
  source 1..23: mol_type = genomic DNA
atagcaactcaaccaaacaaagg

SEQ ID NO: 9228 - DNA, 23 bp, Homo sapiens
  source 1..23: mol_type = genomic DNA
cagtccgtagaactcacagatgg

SEQ ID NO: 9229 - DNA, 23 bp, Homo sapiens
  source 1..23: mol_type = genomic DNA
tgtggtgatgagggatgccaggg

SEQ ID NO: 9230 - DNA, 23 bp, Homo sapiens
  source 1..23: mol_type = genomic DNA
tttacgtgctgaaaattctgggg

SEQ ID NO: 9231 - DNA, 23 bp, Homo sapiens
  source 1..23: mol_type = genomic DNA
tgacatgtgaattaaatgggagg

SEQ ID NO: 9232 - DNA, 23 bp, Homo sapiens
  source 1..23: mol_type = genomic DNA
cggggctttatgaaagagggagg

SEQ ID NO: 9233 - DNA, 23 bp, Homo sapiens
  source 1..23: mol_type = genomic DNA
cccgttgctgatgcattgtgtgg

SEQ ID NO: 9234 - DNA, 23 bp, Homo sapiens
  source 1..23: mol_type = genomic DNA
ctagaattataatatacccaggg

SEQ ID NO: 9235 - DNA, 23 bp, Homo sapiens
  source 1..23: mol_type = genomic DNA
tggtaaagaggtacagatggggg

SEQ ID NO: 9236 - DNA, 23 bp, Homo sapiens
  source 1..23: mol_type = genomic DNA
cagtgatgcgagatacccacagg

SEQ ID NO: 9237 - DNA, 23 bp, Homo sapiens
  source 1..23: mol_type = genomic DNA
aatggtaaatcaagagagcgtgg

SEQ ID NO: 9238 - DNA, 23 bp, Homo sapiens
  source 1..23: mol_type = genomic DNA
gtccatgctcagatccacaacgg

SEQ ID NO: 9239 - DNA, 23 bp, Homo sapiens
  source 1..23: mol_type = genomic DNA
ttaatctaatctgcttcacaagg

SEQ ID NO: 9240 - DNA, 23 bp, Homo sapiens
  source 1..23: mol_type = genomic DNA
cctggctccagtaaattcaaggg

SEQ ID NO: 9241 - DNA, 23 bp, Homo sapiens
  source 1..23: mol_type = genomic DNA
aatctgcagtaacattgctgagg

SEQ ID NO: 9242 - DNA, 23 bp, Homo sapiens
  source 1..23: mol_type = genomic DNA
aagattgaagacaaaagaggagg

SEQ ID NO: 9243 - DNA, 23 bp, Homo sapiens
  source 1..23: mol_type = genomic DNA
atgtacgctagaagttggaaggg

SEQ ID NO: 9244 - DNA, 23 bp, Homo sapiens
  source 1..23: mol_type = genomic DNA
ctactgtcgttatcaataggtgg

SEQ ID NO: 9245 - DNA, 23 bp, Homo sapiens
  source 1..23: mol_type = genomic DNA
aatagtaactaactgcggatggg

SEQ ID NO: 9246 - DNA, 23 bp, Homo sapiens
  source 1..23: mol_type = genomic DNA
atctgcagtaacattgctgaggg

SEQ ID NO: 9247 - DNA, 23 bp, Homo sapiens
  source 1..23: mol_type = genomic DNA
actcacagatggttgtatggtgg

SEQ ID NO: 9248 - DNA, 23 bp, Homo sapiens
  source 1..23: mol_type = genomic DNA
tccattatgaggcagaaatgtgg

SEQ ID NO: 9249 - DNA, 23 bp, Homo sapiens
  source 1..23: mol_type = genomic DNA
tacacgcatgggtaaacagaagg

SEQ ID NO: 9250 - DNA, 23 bp, Homo sapiens
  source 1..23: mol_type = genomic DNA
ttgggactgaaggaactgatggg

SEQ ID NO: 9251 - DNA, 23 bp, Homo sapiens
  source 1..23: mol_type = genomic DNA
caacggggctttatgaaagaggg

SEQ ID NO: 9252 - DNA, 23 bp, Homo sapiens
  source 1..23: mol_type = genomic DNA
gttctaagacaaaagttgggtgg

SEQ ID NO: 9253 - DNA, 23 bp, Homo sapiens
  source 1..23: mol_type = genomic DNA
attgtgatggtgaaaaaggaagg

SEQ ID NO: 9254 - DNA, 23 bp, Homo sapiens
  source 1..23: mol_type = genomic DNA
tgttaaacaagagtatgtatggg

SEQ ID NO: 9255 - DNA, 23 bp, Homo sapiens
  source 1..23: mol_type = genomic DNA
atcccaattgaacagactggtgg

SEQ ID NO: 9256 - DNA, 23 bp, Homo sapiens
  source 1..23: mol_type = genomic DNA
ttacctgacatgcactgacaggg

SEQ ID NO: 9257 - DNA, 23 bp, Homo sapiens
  source 1..23: mol_type = genomic DNA
tgaagttctctacagaatgaggg

SEQ ID NO: 9258 - DNA, 23 bp, Homo sapiens
  source 1..23: mol_type = genomic DNA
tgtttaatactggactgagaggg

SEQ ID NO: 9259 - DNA, 23 bp, Homo sapiens
  source 1..23: mol_type = genomic DNA
agagttggcatgagacatagagg

SEQ ID NO: 9260 - DNA, 23 bp, Homo sapiens
  source 1..23: mol_type = genomic DNA
tgtgttaatatcctctaggtggg

SEQ ID NO: 9261 - DNA, 23 bp, Homo sapiens
  source 1..23: mol_type = genomic DNA
ataatggtattcattcagtaggg

SEQ ID NO: 9262 - DNA, 23 bp, Homo sapiens
  source 1..23: mol_type = genomic DNA
tgagaaccaagccatacccttgg

SEQ ID NO: 9263 - DNA, 23 bp, Homo sapiens
  source 1..23: mol_type = genomic DNA
tcatattgttgtacgtgccaagg

SEQ ID NO: 9264 - DNA, 23 bp, Homo sapiens
  source 1..23: mol_type = genomic DNA
caagctaccaaggaatgcctggg

SEQ ID NO: 9265 - DNA, 23 bp, Homo sapiens
  source 1..23: mol_type = genomic DNA
taagctcgcacatttcctgtggg

SEQ ID NO: 9266 - DNA, 23 bp, Homo sapiens
  source 1..23: mol_type = genomic DNA
cagcattaaaaggaatcaagtgg

SEQ ID NO: 9267 - DNA, 23 bp, Homo sapiens
  source 1..23: mol_type = genomic DNA
ttccaacttctagcgtacatagg

SEQ ID NO: 9268 - DNA, 23 bp, Homo sapiens
  source 1..23: mol_type = genomic DNA
atacttaagatttacctcccagg

SEQ ID NO: 9269 - DNA, 23 bp, Homo sapiens
  source 1..23: mol_type = genomic DNA
gtaagaaattggataaaatgggg

SEQ ID NO: 9270 - DNA, 23 bp, Homo sapiens
  source 1..23: mol_type = genomic DNA
atggcatcacaaaaatgtatggg

SEQ ID NO: 9271 - DNA, 23 bp, Homo sapiens
  source 1..23: mol_type = genomic DNA
caaagaggtcgtaacatacaggg

SEQ ID NO: 9272 - DNA, 23 bp, Homo sapiens
  source 1..23: mol_type = genomic DNA
actgaatagtgtttagccaaggg

SEQ ID NO: 9273 - DNA, 23 bp, Homo sapiens
  source 1..23: mol_type = genomic DNA
taaagtatagaactcaagcatgg

SEQ ID NO: 9274 - DNA, 23 bp, Homo sapiens
  source 1..23: mol_type = genomic DNA
tctaagacaaaagttgggtgggg

SEQ ID NO: 9275 - DNA, 23 bp, Homo sapiens
  source 1..23: mol_type = genomic DNA
ggtttctaatcctaatacagtgg

SEQ ID NO: 9276 - DNA, 23 bp, Homo sapiens
  source 1..23: mol_type = genomic DNA
accacacaatgcatcagcaacgg

SEQ ID NO: 9277 - DNA, 23 bp, Homo sapiens
  source 1..23: mol_type = genomic DNA
ctataaagtgcatcataatgagg

SEQ ID NO: 9278 - DNA, 23 bp, Homo sapiens
  source 1..23: mol_type = genomic DNA
gttaaaataacaaagccacttgg

SEQ ID NO: 9279 - DNA, 23 bp, Homo sapiens
  source 1..23: mol_type = genomic DNA
ttttcaatataattcatccaagg

SEQ ID NO: 9280 - DNA, 23 bp, Homo sapiens
  source 1..23: mol_type = genomic DNA
ctgtttctaataaagaaagaagg

SEQ ID NO: 9281 - DNA, 23 bp, Homo sapiens
  source 1..23: mol_type = genomic DNA
gaggaaacctcaagctaccaagg

SEQ ID NO: 9282 - DNA, 23 bp, Homo sapiens
  source 1..23: mol_type = genomic DNA
ttccattaaccactcctacaggg

SEQ ID NO: 9283 - DNA, 23 bp, Homo sapiens
  source 1..23: mol_type = genomic DNA
ggtatcccaattgaacagactgg

SEQ ID NO: 9284 - DNA, 23 bp, Homo sapiens
  source 1..23: mol_type = genomic DNA
cagagtcgtctgtttaaacccgg

SEQ ID NO: 9285 - DNA, 23 bp, Homo sapiens
  source 1..23: mol_type = genomic DNA
aagagacaagcaatatgaagtgg

SEQ ID NO: 9286 - DNA, 23 bp, Homo sapiens
  source 1..23: mol_type = genomic DNA
tccattaaccactcctacagggg

SEQ ID NO: 9287 - DNA, 23 bp, Homo sapiens
  source 1..23: mol_type = genomic DNA
cttccttattggactaaatgggg

SEQ ID NO: 9288 - DNA, 23 bp, Homo sapiens
  source 1..23: mol_type = genomic DNA
taaccacacaagcatcaccttgg

SEQ ID NO: 9289 - DNA, 23 bp, Homo sapiens
  source 1..23: mol_type = genomic DNA
acctctttaccaaagacagctgg

SEQ ID NO: 9290 - DNA, 23 bp, Homo sapiens
  source 1..23: mol_type = genomic DNA
tttgagtgattccagagctgagg

SEQ ID NO: 9291 - DNA, 23 bp, Homo sapiens
  source 1..23: mol_type = genomic DNA
cattattgctaaaagctcaaggg

SEQ ID NO: 9292 - DNA, 23 bp, Homo sapiens
  source 1..23: mol_type = genomic DNA
taagcttgtaaccccataggtgg

SEQ ID NO: 9293 - DNA, 23 bp, Homo sapiens
  source 1..23: mol_type = genomic DNA
ttaagctcgcacatttcctgtgg

SEQ ID NO: 9294 - DNA, 23 bp, Homo sapiens
  source 1..23: mol_type = genomic DNA
gatgagggatgccagggcgaagg

SEQ ID NO: 9295 - DNA, 23 bp, Homo sapiens
  source 1..23: mol_type = genomic DNA
gcggaaacaattatgtgccatgg

SEQ ID NO: 9296 - DNA, 23 bp, Homo sapiens
  source 1..23: mol_type = genomic DNA
ggacgagaagatggtacagaagg

SEQ ID NO: 9297 - DNA, 23 bp, Homo sapiens
  source 1..23: mol_type = genomic DNA
agcttgtatgaatcaaatgcagg

SEQ ID NO: 9298 - DNA, 23 bp, Homo sapiens
  source 1..23: mol_type = genomic DNA
gggtcagctaatgatgaaatggg

SEQ ID NO: 9299 - DNA, 23 bp, Homo sapiens
  source 1..23: mol_type = genomic DNA
cgagaagatggtacagaaggagg

SEQ ID NO: 9300 - DNA, 23 bp, Homo sapiens
  source 1..23: mol_type = genomic DNA
ggatcagattattaaacatgagg

SEQ ID NO: 9301 - DNA, 23 bp, Homo sapiens
  source 1..23: mol_type = genomic DNA
tttggtaaagaggtacagatggg

SEQ ID NO: 9302 - DNA, 23 bp, Homo sapiens
  source 1..23: mol_type = genomic DNA
ccttgaatttactggagccaggg

SEQ ID NO: 9303 - DNA, 23 bp, Homo sapiens
  source 1..23: mol_type = genomic DNA
acccaccatacaaaattacaggg

SEQ ID NO: 9304 - DNA, 23 bp, Homo sapiens
  source 1..23: mol_type = genomic DNA
gcatctggatatctcactgtagg

SEQ ID NO: 9305 - DNA, 23 bp, Homo sapiens
  source 1..23: mol_type = genomic DNA
tgccagggcgaaggaagagaagg

SEQ ID NO: 9306 - DNA, 23 bp, Homo sapiens
  source 1..23: mol_type = genomic DNA
acaagtctatagagactggtagg

SEQ ID NO: 9307 - DNA, 23 bp, Homo sapiens
  source 1..23: mol_type = genomic DNA
gtgcaagacattaacctcaaagg

SEQ ID NO: 9308 - DNA, 23 bp, Homo sapiens
  source 1..23: mol_type = genomic DNA
agaaataagggattttcagaggg

SEQ ID NO: 9309 - DNA, 23 bp, Homo sapiens
  source 1..23: mol_type = genomic DNA
ttgagtgattccagagctgaggg

SEQ ID NO: 9310 - DNA, 23 bp, Homo sapiens
  source 1..23: mol_type = genomic DNA
tcaaagaaaagttatagcaaggg

SEQ ID NO: 9311 - DNA, 23 bp, Homo sapiens
  source 1..23: mol_type = genomic DNA
atttttagagttctaactcaggg

SEQ ID NO: 9312 - DNA, 23 bp, Homo sapiens
  source 1..23: mol_type = genomic DNA
gtttgaagaaaaccaaagacagg

SEQ ID NO: 9313 - DNA, 23 bp, Homo sapiens
  source 1..23: mol_type = genomic DNA
atagtgtttagccaagggtatgg

SEQ ID NO: 9314 - DNA, 23 bp, Homo sapiens
  source 1..23: mol_type = genomic DNA
acgtaaatcagatactagaaagg

SEQ ID NO: 9315 - DNA, 23 bp, Homo sapiens
  source 1..23: mol_type = genomic DNA
gataccagaaaataaagagcagg

SEQ ID NO: 9316 - DNA, 23 bp, Homo sapiens
  source 1..23: mol_type = genomic DNA
ctttacaattttaaacaacaggg

SEQ ID NO: 9317 - DNA, 23 bp, Homo sapiens
  source 1..23: mol_type = genomic DNA
aattggctgatccaatggaatgg

SEQ ID NO: 9318 - DNA, 23 bp, Homo sapiens
  source 1..23: mol_type = genomic DNA
gttgtgtagcacaaattagaagg

SEQ ID NO: 9319 - DNA, 23 bp, Homo sapiens
  source 1..23: mol_type = genomic DNA
ctttctctatgagtgttcgtggg

SEQ ID NO: 9320 - DNA, 23 bp, Homo sapiens
  source 1..23: mol_type = genomic DNA
cctagtcacttagaaataggtgg

SEQ ID NO: 9321 - DNA, 23 bp, Homo sapiens
  source 1..23: mol_type = genomic DNA
tatgtacgctagaagttggaagg

SEQ ID NO: 9322 - DNA, 23 bp, Homo sapiens
  source 1..23: mol_type = genomic DNA
ttaaaaaaaaatacacgcatggg

SEQ ID NO: 9323 - DNA, 23 bp, Homo sapiens
  source 1..23: mol_type = genomic DNA
atggttctaagacaaaagttggg

SEQ ID NO: 9324 - DNA, 23 bp, Homo sapiens
  source 1..23: mol_type = genomic DNA
ctaagatctaaatcatacattgg

SEQ ID NO: 9325 - DNA, 23 bp, Homo sapiens
  source 1..23: mol_type = genomic DNA
tttttttttctctagagaagagg

SEQ ID NO: 9326 - DNA, 23 bp, Homo sapiens
  source 1..23: mol_type = genomic DNA
ctcttaacgccaatactgatggg

SEQ ID NO: 9327 - DNA, 23 bp, Homo sapiens
  source 1..23: mol_type = genomic DNA
gcaacggggctttatgaaagagg

SEQ ID NO: 9328 - DNA, 23 bp, Homo sapiens
  source 1..23: mol_type = genomic DNA
agatctaaatcatacattggagg

SEQ ID NO: 9329 - DNA, 23 bp, Homo sapiens
  source 1..23: mol_type = genomic DNA
agtatcacacaggttacaaaggg

SEQ ID NO: 9330 - DNA, 23 bp, Homo sapiens
  source 1..23: mol_type = genomic DNA
actattggctggaattgtcgtgg

SEQ ID NO: 9331 - DNA, 23 bp, Homo sapiens
  source 1..23: mol_type = genomic DNA
tatgtactaatgcaattgagtgg

SEQ ID NO: 9332 - DNA, 23 bp, Homo sapiens
  source 1..23: mol_type = genomic DNA
tactgaatagtgtttagccaagg

SEQ ID NO: 9333 - DNA, 23 bp, Homo sapiens
  source 1..23: mol_type = genomic DNA
ccaggtattgggagatcgatggg

SEQ ID NO: 9334 - DNA, 23 bp, Homo sapiens
  source 1..23: mol_type = genomic DNA
ttttaagcttgtaaccccatagg

SEQ ID NO: 9335 - DNA, 23 bp, Homo sapiens
  source 1..23: mol_type = genomic DNA
gaattagtttgagatacaaaggg

SEQ ID NO: 9336 - DNA, 23 bp, Homo sapiens
  source 1..23: mol_type = genomic DNA
aaaattccttgagttcagacagg

SEQ ID NO: 9337 - DNA, 23 bp, Homo sapiens
  source 1..23: mol_type = genomic DNA
ccccgttgtggatctgagcatgg

SEQ ID NO: 9338 - DNA, 23 bp, Homo sapiens
  source 1..23: mol_type = genomic DNA
acaaccatctgtgagttctacgg

SEQ ID NO: 9339 - DNA, 23 bp, Homo sapiens
  source 1..23: mol_type = genomic DNA
ttacatttatatctatagatggg

SEQ ID NO: 9340 - DNA, 23 bp, Homo sapiens
  source 1..23: mol_type = genomic DNA
ttgtgatgctttctatgcaaagg

SEQ ID NO: 9341 - DNA, 23 bp, Homo sapiens
  source 1..23: mol_type = genomic DNA
gccttagtggatatacgcctggg

SEQ ID NO: 9342 - DNA, 23 bp, Homo sapiens
  source 1..23: mol_type = genomic DNA
attttcttctacaatccaaatgg

SEQ ID NO: 9343 - DNA, 23 bp, Homo sapiens
  source 1..23: mol_type = genomic DNA
gacactacagagctatatagagg

SEQ ID NO: 9344 - DNA, 23 bp, Homo sapiens
  source 1..23: mol_type = genomic DNA
actcagagaaggatcttagcagg

SEQ ID NO: 9345 - DNA, 23 bp, Homo sapiens
  source 1..23: mol_type = genomic DNA
ggtataaaacgataaggaagagg

SEQ ID NO: 9346 - DNA, 23 bp, Homo sapiens
  source 1..23: mol_type = genomic DNA
aaattctgagatgtactaatggg

SEQ ID NO: 9347 - DNA, 23 bp, Homo sapiens
  source 1..23: mol_type = genomic DNA
tcttctacaatccaaatggtagg

SEQ ID NO: 9348 - DNA, 23 bp, Homo sapiens
  source 1..23: mol_type = genomic DNA
aagaagattgaagacaaaagagg

SEQ ID NO: 9349 - DNA, 23 bp, Homo sapiens
  source 1..23: mol_type = genomic DNA
aagactatatccctcagctctgg

SEQ ID NO: 9350 - DNA, 23 bp, Homo sapiens
  source 1..23: mol_type = genomic DNA
gaggaaaatctgacaagcctggg

SEQ ID NO: 9351 - DNA, 23 bp, Homo sapiens
  source 1..23: mol_type = genomic DNA
ttaaaaaataactaatcataggg

SEQ ID NO: 9352 - DNA, 23 bp, Homo sapiens
  source 1..23: mol_type = genomic DNA
ggaaatataagcaagtatgctgg

SEQ ID NO: 9353 - DNA, 23 bp, Homo sapiens
  source 1..23: mol_type = genomic DNA
tgaattagtttgagatacaaagg

SEQ ID NO: 9354 - DNA, 23 bp, Homo sapiens
  source 1..23: mol_type = genomic DNA
ttttagctgtcacttccaaaggg

SEQ ID NO: 9355 - DNA, 23 bp, Homo sapiens
  source 1..23: mol_type = genomic DNA
gccagctgtctttggtaaagagg

SEQ ID NO: 9356 - DNA, 23 bp, Homo sapiens
  source 1..23: mol_type = genomic DNA
ttatatggcagaaattctcctgg

SEQ ID NO: 9357 - DNA, 23 bp, Homo sapiens
  source 1..23: mol_type = genomic DNA
tgtgtaaagtgtgcccctgtagg

SEQ ID NO: 9358 - DNA, 23 bp, Homo sapiens
  source 1..23: mol_type = genomic DNA
attgaaagatccaaaaaagatgg

SEQ ID NO: 9359 - DNA, 23 bp, Homo sapiens
  source 1..23: mol_type = genomic DNA
gggaagcaggggttgaagggagg

SEQ ID NO: 9360 - DNA, 23 bp, Homo sapiens
  source 1..23: mol_type = genomic DNA
gtttagccaagggtatggcttgg

SEQ ID NO: 9361 - DNA, 23 bp, Homo sapiens
  source 1..23: mol_type = genomic DNA
ttagaatttgtgatttcttgtgg

SEQ ID NO: 9362 - DNA, 23 bp, Homo sapiens
  source 1..23: mol_type = genomic DNA
tagatctgcatcatcacgtcagg

SEQ ID NO: 9363 - DNA, 23 bp, Homo sapiens
  source 1..23: mol_type = genomic DNA
acctctttgcacataccaccggg

SEQ ID NO: 9364 - DNA, 23 bp, Homo sapiens
  source 1..23: mol_type = genomic DNA
ctgggtatattataattctaggg

SEQ ID NO: 9365 - DNA, 23 bp, Homo sapiens
  source 1..23: mol_type = genomic DNA
cctgggaatgtgatgaatgctgg

SEQ ID NO: 9366 - DNA, 23 bp, Homo sapiens
  source 1..23: mol_type = genomic DNA
tgaaggaattgtggtgatgaggg

SEQ ID NO: 9367 - DNA, 23 bp, Homo sapiens
  source 1..23: mol_type = genomic DNA
agaagaagaggacgagaagatgg

SEQ ID NO: 9368 - DNA, 23 bp, Homo sapiens
  source 1..23: mol_type = genomic DNA
gactctgagctccttgaggtggg

SEQ ID NO: 9369 - DNA, 23 bp, Homo sapiens
  source 1..23: mol_type = genomic DNA
ctgcgaggtataaaacgataagg

SEQ ID NO: 9370 - DNA, 23 bp, Homo sapiens
  source 1..23: mol_type = genomic DNA
ttttccaaagaagactctaaagg

SEQ ID NO: 9371 - DNA, 23 bp, Homo sapiens
  source 1..23: mol_type = genomic DNA
tcttcttcactggagttgatggg

SEQ ID NO: 9372 - DNA, 23 bp, Homo sapiens
  source 1..23: mol_type = genomic DNA
ctaatgcaatcgagtgtgacagg

SEQ ID NO: 9373 - DNA, 23 bp, Homo sapiens
  source 1..23: mol_type = genomic DNA
aggaagagaaggcgtgagatggg

SEQ ID NO: 9374 - DNA, 23 bp, Homo sapiens
  source 1..23: mol_type = genomic DNA
atcctttttgagcctctggatgg

SEQ ID NO: 9375 - DNA, 23 bp, Homo sapiens
  source 1..23: mol_type = genomic DNA
gctgggaagcaggggttgaaggg

SEQ ID NO: 9376 - DNA, 23 bp, Homo sapiens
  source 1..23: mol_type = genomic DNA
tttgcaattctttaacgggttgg

SEQ ID NO: 9377 - DNA, 23 bp, Homo sapiens
  source 1..23: mol_type = genomic DNA
caatttgtagaaatactttgtgg

SEQ ID NO: 9378 - DNA, 23 bp, Homo sapiens
  source 1..23: mol_type = genomic DNA
tatcagaagcagacagaagttgg

SEQ ID NO: 9379 - DNA, 23 bp, Homo sapiens
  source 1..23: mol_type = genomic DNA
tttgggactgaaggaactgatgg

SEQ ID NO: 9380 - DNA, 23 bp, Homo sapiens
  source 1..23: mol_type = genomic DNA
gccccagctaaatcctcaaatgg

SEQ ID NO: 9381 - DNA, 23 bp, Homo sapiens
  source 1..23: mol_type = genomic DNA
gcatcactgtttgagcgctatgg

SEQ ID NO: 9382 - DNA, 23 bp, Homo sapiens
  source 1..23: mol_type = genomic DNA
aatggaatggaatgaatttgagg

SEQ ID NO: 9383 - DNA, 23 bp, Homo sapiens
  source 1..23: mol_type = genomic DNA
ccagcattcatcacattcccagg

SEQ ID NO: 9384 - DNA, 23 bp, Homo sapiens
  source 1..23: mol_type = genomic DNA
aggcattccttggtagcttgagg

SEQ ID NO: 9385 - DNA, 23 bp, Homo sapiens
  source 1..23: mol_type = genomic DNA
aaacaaatacagaagagtatagg

SEQ ID NO: 9386 - DNA, 23 bp, Homo sapiens
  source 1..23: mol_type = genomic DNA
tttcaattaagagtcttttgagg

SEQ ID NO: 9387 - DNA, 23 bp, Homo sapiens
  source 1..23: mol_type = genomic DNA
ttaaataaggctgggaagcaggg

SEQ ID NO: 9388 - DNA, 23 bp, Homo sapiens
  source 1..23: mol_type = genomic DNA
tattttcaagaaggaaaacctgg

SEQ ID NO: 9389 - DNA, 23 bp, Homo sapiens
  source 1..23: mol_type = genomic DNA
taaaccttctaagttaatatggg

SEQ ID NO: 9390 - DNA, 23 bp, Homo sapiens
  source 1..23: mol_type = genomic DNA
gcttaaagaaaactttcctcagg

SEQ ID NO: 9391 - DNA, 23 bp, Homo sapiens
  source 1..23: mol_type = genomic DNA
tcaacagaattttagtgcaatgg

SEQ ID NO: 9392 - DNA, 23 bp, Homo sapiens
  source 1..23: mol_type = genomic DNA
aatgtcatctgatataaagttgg

SEQ ID NO: 9393 - DNA, 23 bp, Homo sapiens
  source 1..23: mol_type = genomic DNA
tccatgctcagatccacaacggg

SEQ ID NO: 9394 - DNA, 23 bp, Homo sapiens
  source 1..23: mol_type = genomic DNA
aatgagcaaatgttaaagaatgg

SEQ ID NO: 9395 - DNA, 23 bp, Homo sapiens
  source 1..23: mol_type = genomic DNA
aatagaagttatttatgaagagg

SEQ ID NO: 9396 - DNA, 23 bp, Homo sapiens
  source 1..23: mol_type = genomic DNA
ataaaaataattataaagaatgg

SEQ ID NO: 9397 - DNA, 23 bp, Homo sapiens
  source 1..23: mol_type = genomic DNA
gcagacatttttctaaggcatgg

SEQ ID NO: 9398 - DNA, 23 bp, Homo sapiens
  source 1..23: mol_type = genomic DNA
atctagactagtatctaaaaggg

SEQ ID NO: 9399 - DNA, 23 bp, Homo sapiens
  source 1..23: mol_type = genomic DNA
ggaaggcagtagccattaaaggg

SEQ ID NO: 9400 - DNA, 23 bp, Homo sapiens
  source 1..23: mol_type = genomic DNA
caagtattctattttcaagaagg

SEQ ID NO: 9401 - DNA, 23 bp, Homo sapiens
  source 1..23: mol_type = genomic DNA
atagccattcaggcaatgatagg

SEQ ID NO: 9402 - DNA, 23 bp, Homo sapiens
  source 1..23: mol_type = genomic DNA
tagcagagaagtgtattataggg

SEQ ID NO: 9403 - DNA, 23 bp, Homo sapiens
  source 1..23: mol_type = genomic DNA
atatgacatgtgaattaaatggg

SEQ ID NO: 9404 - DNA, 23 bp, Homo sapiens
  source 1..23: mol_type = genomic DNA
ctcctatgtacgctagaagttgg

SEQ ID NO: 9405 - DNA, 23 bp, Homo sapiens
  source 1..23: mol_type = genomic DNA
tgggaggtaaatcttaagtatgg

SEQ ID NO: 9406 - DNA, 23 bp, Homo sapiens
  source 1..23: mol_type = genomic DNA
atctctgtttcaaagtcaaatgg

SEQ ID NO: 9407 - DNA, 23 bp, Homo sapiens
  source 1..23: mol_type = genomic DNA
gcatcatcacgtcaggtagatgg

SEQ ID NO: 9408 - DNA, 23 bp, Homo sapiens
  source 1..23: mol_type = genomic DNA
aattatacatttccacctatggg

SEQ ID NO: 9409 - DNA, 23 bp, Homo sapiens
  source 1..23: mol_type = genomic DNA
tatggcatcacaaaaatgtatgg

SEQ ID NO: 9410 - DNA, 23 bp, Homo sapiens
  source 1..23: mol_type = genomic DNA
gatataaagaacactttaagtgg

SEQ ID NO: 9411 - DNA, 23 bp, Homo sapiens
  source 1..23: mol_type = genomic DNA
tacatgcagatatatcctattgg

SEQ ID NO: 9412 - DNA, 23 bp, Homo sapiens
  source 1..23: mol_type = genomic DNA
caacagggccatattccaatagg

SEQ ID NO: 9413 - DNA, 23 bp, Homo sapiens
  source 1..23: mol_type = genomic DNA
atccagatgccgaatccctttgg

SEQ ID NO: 9414 - DNA, 23 bp, Homo sapiens
  source 1..23: mol_type = genomic DNA
caaagacatctactaaatatcgg

SEQ ID NO: 9415 - DNA, 23 bp, Homo sapiens
  source 1..23: mol_type = genomic DNA
attccattaaccactcctacagg

SEQ ID NO: 9416 - DNA, 23 bp, Homo sapiens
  source 1..23: mol_type = genomic DNA
actctaaaaatacttccaatagg

SEQ ID NO: 9417 - DNA, 23 bp, Homo sapiens
  source 1..23: mol_type = genomic DNA
gaataacatacctaaaaataggg

SEQ ID NO: 9418 - DNA, 23 bp, Homo sapiens
  source 1..23: mol_type = genomic DNA
cgccttctcttccttcgccctgg

SEQ ID NO: 9419 - DNA, 23 bp, Homo sapiens
  source 1..23: mol_type = genomic DNA
tcccctgtaattttgtatggtgg

SEQ ID NO: 9420 - DNA, 23 bp, Homo sapiens
  source 1..23: mol_type = genomic DNA
gtaaaaggtgtattttccttagg

SEQ ID NO: 9421 - DNA, 23 bp, Homo sapiens
  source 1..23: mol_type = genomic DNA
tttagagtcttctttggaaaagg

SEQ ID NO: 9422 - DNA, 23 bp, Homo sapiens
  source 1..23: mol_type = genomic DNA
ctactactgtcgttatcaatagg

SEQ ID NO: 9423 - DNA, 23 bp, Homo sapiens
  source 1..23: mol_type = genomic DNA
gcccctgtaggagtggttaatgg

SEQ ID NO: 9424 - DNA, 23 bp, Homo sapiens
  source 1..23: mol_type = genomic DNA
gcgtagagagtctgtttcatagg

SEQ ID NO: 9425 - DNA, 23 bp, Homo sapiens
  source 1..23: mol_type = genomic DNA
ttatgattcagctaatatctagg

SEQ ID NO: 9426 - DNA, 23 bp, Homo sapiens
  source 1..23: mol_type = genomic DNA
gatggttctaagacaaaagttgg

SEQ ID NO: 9427 - DNA, 23 bp, Homo sapiens
  source 1..23: mol_type = genomic DNA
gatgggcactcaacactaatagg

SEQ ID NO: 9428 - DNA, 23 bp, Homo sapiens
  source 1..23: mol_type = genomic DNA
gttttctgacttaaaacaatagg

SEQ ID NO: 9429 - DNA, 23 bp, Homo sapiens
  source 1..23: mol_type = genomic DNA
tgccatccagaggctcaaaaagg

SEQ ID NO: 9430 - DNA, 23 bp, Homo sapiens
  source 1..23: mol_type = genomic DNA
aatgagaattgcctaccatttgg

SEQ ID NO: 9431 - DNA, 23 bp, Homo sapiens
  source 1..23: mol_type = genomic DNA
tcttccttattggactaaatggg

SEQ ID NO: 9432 - DNA, 23 bp, Homo sapiens
  source 1..23: mol_type = genomic DNA
atttcccctgtaattttgtatgg

SEQ ID NO: 9433 - DNA, 23 bp, Homo sapiens
  source 1..23: mol_type = genomic DNA
actgcttcgtaataattagatgg

SEQ ID NO: 9434 - DNA, 23 bp, Homo sapiens
  source 1..23: mol_type = genomic DNA
atgcttctactagataagattgg

SEQ ID NO: 9435 - DNA, 23 bp, Homo sapiens
  source 1..23: mol_type = genomic DNA
atatccaaccgtctgttcatagg

SEQ ID NO: 9436 - DNA, 23 bp, Homo sapiens
  source 1..23: mol_type = genomic DNA
tgtgagactttgtaattcattgg

SEQ ID NO: 9437 - DNA, 23 bp, Homo sapiens
  source 1..23: mol_type = genomic DNA
aattacaaagtctcacaaaatgg

SEQ ID NO: 9438 - DNA, 23 bp, Homo sapiens
  source 1..23: mol_type = genomic DNA
taaaatggcacgtaacaaaatgg

SEQ ID NO: 9439 - DNA, 23 bp, Homo sapiens
  source 1..23: mol_type = genomic DNA
acacagtgaaacattttagaagg

SEQ ID NO: 9440 - DNA, 23 bp, Homo sapiens
  source 1..23: mol_type = genomic DNA
tcagtgcatgtcaggtaaaatgg

SEQ ID NO: 9441 - DNA, 23 bp, Homo sapiens
  source 1..23: mol_type = genomic DNA
aagatttttttgacttaaaaggg

SEQ ID NO: 9442 - DNA, 23 bp, Homo sapiens
  source 1..23: mol_type = genomic DNA
tctcctagtcacttagaaatagg

SEQ ID NO: 9443 - DNA, 23 bp, Homo sapiens
  source 1..23: mol_type = genomic DNA
gagagaaagaatctaattatcgg

SEQ ID NO: 9444 - DNA, 23 bp, Homo sapiens
  source 1..23: mol_type = genomic DNA
tgttctttatatccaaataatgg

SEQ ID NO: 9445 - DNA, 23 bp, Homo sapiens
  source 1..23: mol_type = genomic DNA
gccacatttctgcctcataatgg

SEQ ID NO: 9446 - DNA, 23 bp, Homo sapiens
  source 1..23: mol_type = genomic DNA
ctgagtttctatttacgtatagg

SEQ ID NO: 9447 - DNA, 23 bp, Homo sapiens
  source 1..23: mol_type = genomic DNA
tgaagcaccatactataaaatgg

SEQ ID NO: 9448 - DNA, 23 bp, Homo sapiens
  source 1..23: mol_type = genomic DNA
tattataccactatataaaatgg

SEQ ID NO: 9449 - DNA, 23 bp, Homo sapiens
  source 1..23: mol_type = genomic DNA
gtggagtgcaagaaaataaaagg

SEQ ID NO: 9450 - DNA, 23 bp, Homo sapiens
  source 1..23: mol_type = genomic DNA
ttgcagtgagaacaagtaaaagg

SEQ ID NO: 9451 - DNA, 23 bp, Homo sapiens
  source 1..23: mol_type = genomic DNA
aatattgctaagcaataaatagg

SEQ ID NO: 9452 - DNA, 23 bp, Homo sapiens
  source 1..23: mol_type = genomic DNA
tatatagtcttcagttttagagg

SEQ ID NO: 9453 - DNA, 23 bp, Homo sapiens
  source 1..23: mol_type = genomic DNA
actcaagcatggattcttttggg

SEQ ID NO: 9454 - DNA, 23 bp, Homo sapiens
  source 1..23: mol_type = genomic DNA
gagaatttctgccatataaaagg

SEQ ID NO: 9455 - DNA, 23 bp, Homo sapiens
  source 1..23: mol_type = genomic DNA
tcactgctgttattctttgcagg

SEQ ID NO: 9456 - DNA, 23 bp, Homo sapiens
  source 1..23: mol_type = genomic DNA
agtcttgtccttaactttagagg

SEQ ID NO: 9457 - DNA, 23 bp, Homo sapiens
  source 1..23: mol_type = genomic DNA
agttagacttttattctttaggg

SEQ ID NO: 9458 - DNA, 23 bp, Homo sapiens
  source 1..23: mol_type = genomic DNA
gttagacaagtgtaagaaattgg

SEQ ID NO: 9459 - DNA, 23 bp, Homo sapiens
  source 1..23: mol_type = genomic DNA
tcactgttggtcaaaataattgg

SEQ ID NO: 9460 - DNA, 23 bp, Homo sapiens
  source 1..23: mol_type = genomic DNA
ctagctgtaaaagacacgggggg

SEQ ID NO: 9461 - DNA, 23 bp, Homo sapiens
  source 1..23: mol_type = genomic DNA
actagctgtaaaagacacggggg

SEQ ID NO: 9462 - DNA, 23 bp, Homo sapiens
  source 1..23: mol_type = genomic DNA
aactagctgtaaaagacacgggg

SEQ ID NO: 9463 - DNA, 23 bp, Homo sapiens
  source 1..23: mol_type = genomic DNA
gaaactagctgtaaaagacacgg

SEQ ID NO: 9464 - DNA, 23 bp, Homo sapiens
  source 1..23: mol_type = genomic DNA
tgcagtgcctttttagtgcatgg

SEQ ID NO: 9465 - DNA, 23 bp, Homo sapiens
  source 1..23: mol_type = genomic DNA
gtaaatgtatttctgctgtgggg

SEQ ID NO: 9466 - DNA, 23 bp, Homo sapiens
  source 1..23: mol_type = genomic DNA
agagctctagaaaattcaggtgg

SEQ ID NO: 9467 - DNA, 23 bp, Homo sapiens
  source 1..23: mol_type = genomic DNA
gcgtattcctgatgagagtgagg

SEQ ID NO: 9468 - DNA, 23 bp, Homo sapiens
  source 1..23: mol_type = genomic DNA
ggaagatgtttgatggtacgagg

SEQ ID NO: 9469 - DNA, 23 bp, Homo sapiens
  source 1..23: mol_type = genomic DNA
ccctcagttaataatcctggggg

SEQ ID NO: 9470 - DNA, 23 bp, Homo sapiens
  source 1..23: mol_type = genomic DNA
agagcatttttatggccctgagg

SEQ ID NO: 9471 - DNA, 23 bp, Homo sapiens
  source 1..23: mol_type = genomic DNA
tagtgaaaactggtgacagatgg

SEQ ID NO: 9472 - DNA, 23 bp, Homo sapiens
  source 1..23: mol_type = genomic DNA
gctggggaaggacagctctgggg

SEQ ID NO: 9473 - DNA, 23 bp, Homo sapiens
  source 1..23: mol_type = genomic DNA
tgaaccgaatgttaaaactgtgg

SEQ ID NO: 9474 - DNA, 23 bp, Homo sapiens
  source 1..23: mol_type = genomic DNA
tcgagatcaagaaaaaacacagg

SEQ ID NO: 9475 - DNA, 23 bp, Homo sapiens
  source 1..23: mol_type = genomic DNA
tcatttgtttaggtaccatgagg

SEQ ID NO: 9476 - DNA, 23 bp, Homo sapiens
  source 1..23: mol_type = genomic DNA
caagcaggacacaatcccatggg

SEQ ID NO: 9477 - DNA, 23 bp, Homo sapiens
  source 1..23: mol_type = genomic DNA
ggaatgtagacctacctccaagg

SEQ ID NO: 9478 - DNA, 23 bp, Homo sapiens
  source 1..23: mol_type = genomic DNA
acactaagacatccagactcagg

SEQ ID NO: 9479 - DNA, 23 bp, Homo sapiens
  source 1..23: mol_type = genomic DNA
gtgggggtttagcaataggtagg

SEQ ID NO: 9480 - DNA, 23 bp, Homo sapiens
  source 1..23: mol_type = genomic DNA
ccaggattattaactgagggagg

SEQ ID NO: 9481 - DNA, 23 bp, Homo sapiens
  source 1..23: mol_type = genomic DNA
tgtatttgctgccaaatatgggg

SEQ ID NO: 9482 - DNA, 23 bp, Homo sapiens
  source 1..23: mol_type = genomic DNA
tagtatcactgataacccatggg

SEQ ID NO: 9483 - DNA, 23 bp, Homo sapiens
  source 1..23: mol_type = genomic DNA
aaataaaactcacggtgtggggg

SEQ ID NO: 9484 - DNA, 23 bp, Homo sapiens
  source 1..23: mol_type = genomic DNA
tctcattctcaaaacactcgagg

SEQ ID NO: 9485 - DNA, 23 bp, Homo sapiens
  source 1..23: mol_type = genomic DNA
aaaacctatgagtaacctcatgg

SEQ ID NO: 9486 - DNA, 23 bp, Homo sapiens
  source 1..23: mol_type = genomic DNA
gacctacctccaaggtagggagg

SEQ ID NO: 9487 - DNA, 23 bp, Homo sapiens
  source 1..23: mol_type = genomic DNA
aagttcctgtgagctgtggaggg

SEQ ID NO: 9488 - DNA, 23 bp, Homo sapiens
  source 1..23: mol_type = genomic DNA
agaatcacgtaaattatcgtggg

SEQ ID NO: 9489 - DNA, 23 bp, Homo sapiens
  source 1..23: mol_type = genomic DNA
actgaactataacatactccagg

SEQ ID NO: 9490 - DNA, 23 bp, Homo sapiens
  source 1..23: mol_type = genomic DNA
agaaatcttggctagcctcaggg

SEQ ID NO: 9491 - DNA, 23 bp, Homo sapiens
  source 1..23: mol_type = genomic DNA
tggcttaataataaaacaggagg

SEQ ID NO: 9492 - DNA, 23 bp, Homo sapiens
  source 1..23: mol_type = genomic DNA
tgtaaccctccacagctcacagg

SEQ ID NO: 9493 - DNA, 23 bp, Homo sapiens
  source 1..23: mol_type = genomic DNA
ctgacttaatctgtaaacaaagg

SEQ ID NO: 9494 - DNA, 23 bp, Homo sapiens
  source 1..23: mol_type = genomic DNA
tccctcagttaataatcctgggg

SEQ ID NO: 9495 - DNA, 23 bp, Homo sapiens
  source 1..23: mol_type = genomic DNA
ttaaactcatagtatcagaccgg

SEQ ID NO: 9496 - DNA, 23 bp, Homo sapiens
  source 1..23: mol_type = genomic DNA
gtaactacacataatataggtgg

SEQ ID NO: 9497 - DNA, 23 bp, Homo sapiens
  source 1..23: mol_type = genomic DNA
cccccaggattattaactgaggg

SEQ ID NO: 9498 - DNA, 23 bp, Homo sapiens
  source 1..23: mol_type = genomic DNA
aaagatcacagaataagcctggg

SEQ ID NO: 9499 - DNA, 23 bp, Homo sapiens
  source 1..23: mol_type = genomic DNA
agagaatgtgtacaaggcaaagg

SEQ ID NO: 9500 - DNA, 23 bp, Homo sapiens
  source 1..23: mol_type = genomic DNA
tgaaagctagaaagtacatacgg

SEQ ID NO: 9501 - DNA, 23 bp, Homo sapiens
  source 1..23: mol_type = genomic DNA
gcaagcaggacacaatcccatgg

SEQ ID NO: 9502 - DNA, 23 bp, Homo sapiens
  source 1..23: mol_type = genomic DNA
gggagtaatgttcagtacccagg

SEQ ID NO: 9503 - DNA, 23 bp, Homo sapiens
  source 1..23: mol_type = genomic DNA
gtagacctacctccaaggtaggg

SEQ ID NO: 9504 - DNA, 23 bp, Homo sapiens
  source 1..23: mol_type = genomic DNA
ttcactgcctgagtcagcaaagg

SEQ ID NO: 9505 - DNA, 23 bp, Homo sapiens
  source 1..23: mol_type = genomic DNA
gaattccgtcaggaattaagggg

SEQ ID NO: 9506 - DNA, 23 bp, Homo sapiens
  source 1..23: mol_type = genomic DNA
atagtatcactgataacccatgg

SEQ ID NO: 9507 - DNA, 23 bp, Homo sapiens
  source 1..23: mol_type = genomic DNA
tgaactgcagaatgctctagtgg

SEQ ID NO: 9508 - DNA, 23 bp, Homo sapiens
  source 1..23: mol_type = genomic DNA
atttggaaacatgtcagaagagg

SEQ ID NO: 9509 - DNA, 23 bp, Homo sapiens
  source 1..23: mol_type = genomic DNA
ctaagtagcccattttggcatgg

SEQ ID NO: 9510 - DNA, 23 bp, Homo sapiens
  source 1..23: mol_type = genomic DNA
tttttgtaattctttttggtagg

SEQ ID NO: 9511 - DNA, 23 bp, Homo sapiens
  source 1..23: mol_type = genomic DNA
tttgtttacagattaagtcaggg

SEQ ID NO: 9512 - DNA, 23 bp, Homo sapiens
  source 1..23: mol_type = genomic DNA
ataatcacagcatttcagaatgg

SEQ ID NO: 9513 - DNA, 23 bp, Homo sapiens
  source 1..23: mol_type = genomic DNA
gttttaacaggttttaaaagcgg

SEQ ID NO: 9514 - DNA, 23 bp, Homo sapiens
  source 1..23: mol_type = genomic DNA
tcatttctagtaaaagaggccgg

SEQ ID NO: 9515 - DNA, 23 bp, Homo sapiens
  source 1..23: mol_type = genomic DNA
agatattctcaaatggctgtggg

SEQ ID NO: 9516 - DNA, 23 bp, Homo sapiens
  source 1..23: mol_type = genomic DNA
acatatcaataattaaccatagg

SEQ ID NO: 9517 - DNA, 23 bp, Homo sapiens
  source 1..23: mol_type = genomic DNA
tgtcatgacaatttgctctgtgg

SEQ ID NO: 9518 - DNA, 23 bp, Homo sapiens
  source 1..23: mol_type = genomic DNA
tctgagtaagtaagtcaaagagg

SEQ ID NO: 9519 - DNA, 23 bp, Homo sapiens
  source 1..23: mol_type = genomic DNA
gctgcttagaactttatgaaagg

SEQ ID NO: 9520 - DNA, 23 bp, Homo sapiens
  source 1..23: mol_type = genomic DNA
cccagttccagaactcccccagg

SEQ ID NO: 9521 - DNA, 23 bp, Homo sapiens
  source 1..23: mol_type = genomic DNA
tggtacgtatttaaaatgagtgg

SEQ ID NO: 9522 - DNA, 23 bp, Homo sapiens
  source 1..23: mol_type = genomic DNA
ttagattgtccttttcaggaagg

SEQ ID NO: 9523 - DNA, 23 bp, Homo sapiens
  source 1..23: mol_type = genomic DNA
aagtgggaaaaaactataggtgg

SEQ ID NO: 9524 - DNA, 23 bp, Homo sapiens
  source 1..23: mol_type = genomic DNA
aattatttgagggccatcccagg

SEQ ID NO: 9525 - DNA, 23 bp, Homo sapiens
  source 1..23: mol_type = genomic DNA
gatttccccttaattcctgacgg

SEQ ID NO: 9526 - DNA, 23 bp, Homo sapiens
  source 1..23: mol_type = genomic DNA
tgtatccttacaaaaggcccagg

SEQ ID NO: 9527 - DNA, 23 bp, Homo sapiens
  source 1..23: mol_type = genomic DNA
tgtcctgcttgccattgaggtgg

SEQ ID NO: 9528 - DNA, 23 bp, Homo sapiens
  source 1..23: mol_type = genomic DNA
tgagaaaatgagaatggctaagg

SEQ ID NO: 9529 - DNA, 23 bp, Homo sapiens
  source 1..23: mol_type = genomic DNA
agtaaaagaactaagtcgctggg

SEQ ID NO: 9530 - DNA, 23 bp, Homo sapiens
  source 1..23: mol_type = genomic DNA
atcaccagttgtactttgggagg

SEQ ID NO: 9531 - DNA, 23 bp, Homo sapiens
  source 1..23: mol_type = genomic DNA
taagggctacagaagtacttagg

SEQ ID NO: 9532 - DNA, 23 bp, Homo sapiens
  source 1..23: mol_type = genomic DNA
gtacagtcaataaatcagactgg

SEQ ID NO: 9533 - DNA, 23 bp, Homo sapiens
  source 1..23: mol_type = genomic DNA
aggacagctctggggaagcaggg

SEQ ID NO: 9534 - DNA, 23 bp, Homo sapiens
  source 1..23: mol_type = genomic DNA
tcaaatggctgtgggatcaaagg

SEQ ID NO: 9535 - DNA, 23 bp, Homo sapiens
  source 1..23: mol_type = genomic DNA
ccaaatatggggttgttaagtgg

SEQ ID NO: 9536 - DNA, 23 bp, Homo sapiens
  source 1..23: mol_type = genomic DNA
attcctttcaaatcaaccaaagg

SEQ ID NO: 9537 - DNA, 23 bp, Homo sapiens
  source 1..23: mol_type = genomic DNA
ctacctttacctcaactcctggg

SEQ ID NO: 9538 - DNA, 23 bp, Homo sapiens
  source 1..23: mol_type = genomic DNA
atgagtatcaaaaatgatgatgg

SEQ ID NO: 9539 - DNA, 23 bp, Homo sapiens
  source 1..23: mol_type = genomic DNA
agttgcagttattttttccaagg

SEQ ID NO: 9540 - DNA, 23 bp, Homo sapiens
  source 1..23: mol_type = genomic DNA
tggtgtatggaatgcaacccagg

SEQ ID NO: 9541 - DNA, 23 bp, Homo sapiens
  source 1..23: mol_type = genomic DNA
aagatattctcaaatggctgtgg

SEQ ID NO: 9542 - DNA, 23 bp, Homo sapiens
  source 1..23: mol_type = genomic DNA
atccccacctcccacctcaatgg

SEQ ID NO: 9543 - DNA, 23 bp, Homo sapiens
  source 1..23: mol_type = genomic DNA
tatggctctcagcttgggacagg

SEQ ID NO: 9544 - DNA, 23 bp, Homo sapiens
  source 1..23: mol_type = genomic DNA
ttgcattagtactagaacaaagg

SEQ ID NO: 9545 - DNA, 23 bp, Homo sapiens
  source 1..23: mol_type = genomic DNA
gttttcgtttgaattccgtcagg

SEQ ID NO: 9546 - DNA, 23 bp, Homo sapiens
  source 1..23: mol_type = genomic DNA
gccatatgtgtaaggctgaatgg

SEQ ID NO: 9547 - DNA, 23 bp, Homo sapiens
  source 1..23: mol_type = genomic DNA
atttctgctgtggggactgttgg

SEQ ID NO: 9548 - DNA, 23 bp, Homo sapiens
  source 1..23: mol_type = genomic DNA
actcatatctaaaatttactagg

SEQ ID NO: 9549 - DNA, 23 bp, Homo sapiens
  source 1..23: mol_type = genomic DNA
caaattctagaccagctgtcagg

SEQ ID NO: 9550 - DNA, 23 bp, Homo sapiens
  source 1..23: mol_type = genomic DNA
ctacttttctgaattaaagtggg

SEQ ID NO: 9551 - DNA, 23 bp, Homo sapiens
  source 1..23: mol_type = genomic DNA
agttttggcctgcagctgatggg

SEQ ID NO: 9552 - DNA, 23 bp, Homo sapiens
  source 1..23: mol_type = genomic DNA
gtaaaggtagcaagtcaaacagg

SEQ ID NO: 9553 - DNA, 23 bp, Homo sapiens
  source 1..23: mol_type = genomic DNA
tgaattttctagagctctatggg

SEQ ID NO: 9554 - DNA, 23 bp, Homo sapiens
  source 1..23: mol_type = genomic DNA
tcaacctcccaaagtacaactgg

SEQ ID NO: 9555 - DNA, 23 bp, Homo sapiens
  source 1..23: mol_type = genomic DNA
tcaaaagttcagaaaaatagagg

SEQ ID NO: 9556 - DNA, 23 bp, Homo sapiens
  source 1..23: mol_type = genomic DNA
atagtgataatatacagtactgg

SEQ ID NO: 9557 - DNA, 23 bp, Homo sapiens
  source 1..23: mol_type = genomic DNA
ccaaggaatcaactgatatgagg

SEQ ID NO: 9558 - DNA, 23 bp, Homo sapiens
  source 1..23: mol_type = genomic DNA
taccttcctccctaccttggagg

SEQ ID NO: 9559 - DNA, 23 bp, Homo sapiens
  source 1..23: mol_type = genomic DNA
ttcctttcaaatcaaccaaaggg

SEQ ID NO: 9560 - DNA, 23 bp, Homo sapiens
  source 1..23: mol_type = genomic DNA
gtaaaagacaaactaattgaagg

SEQ ID NO: 9561 - DNA, 23 bp, Homo sapiens
  source 1..23: mol_type = genomic DNA
tgtctgaattaattatttgaggg

SEQ ID NO: 9562 - DNA, 23 bp, Homo sapiens
  source 1..23: mol_type = genomic DNA
ggtaccatgaggttactcatagg

SEQ ID NO: 9563 - DNA, 23 bp, Homo sapiens
  source 1..23: mol_type = genomic DNA
ttaaattaaaagaccaatgaggg

SEQ ID NO: 9564 - DNA, 23 bp, Homo sapiens
  source 1..23: mol_type = genomic DNA
atgatggcagattagttgtttgg

SEQ ID NO: 9565 - DNA, 23 bp, Homo sapiens
  source 1..23: mol_type = genomic DNA
aagccacatgaagaaacatttgg

SEQ ID NO: 9566 - DNA, 23 bp, Homo sapiens
  source 1..23: mol_type = genomic DNA
attcttttgcaaactctcaatgg

SEQ ID NO: 9567 - DNA, 23 bp, Homo sapiens
  source 1..23: mol_type = genomic DNA
gtttccacagttttaacattcgg

SEQ ID NO: 9568 - DNA, 23 bp, Homo sapiens
  source 1..23: mol_type = genomic DNA
cctagacatgtagtgaaaactgg

SEQ ID NO: 9569 - DNA, 23 bp, Homo sapiens
  source 1..23: mol_type = genomic DNA
ccataaatgctaaccctcattgg

SEQ ID NO: 9570 - DNA, 23 bp, Homo sapiens
  source 1..23: mol_type = genomic DNA
tccacagctcacaggaactttgg

SEQ ID NO: 9571 - DNA, 23 bp, Homo sapiens
  source 1..23: mol_type = genomic DNA
ggagggttacaaactccctttgg

SEQ ID NO: 9572 - DNA, 23 bp, Homo sapiens
  source 1..23: mol_type = genomic DNA
ttacacatgtaaagttcattagg

SEQ ID NO: 9573 - DNA, 23 bp, Homo sapiens
  source 1..23: mol_type = genomic DNA
ctaagaacaactttcttgattgg

SEQ ID NO: 9574 - DNA, 23 bp, Homo sapiens
  source 1..23: mol_type = genomic DNA
acttagttcttttacttaatggg

SEQ ID NO: 9575 - DNA, 23 bp, Homo sapiens
  source 1..23: mol_type = genomic DNA
gctttgtttccccttaaaaatgg

SEQ ID NO: 9576 - DNA, 23 bp, Homo sapiens
  source 1..23: mol_type = genomic DNA
tggatgctacaaaaattttatgg

SEQ ID NO: 9577 - DNA, 23 bp, Homo sapiens
  source 1..23: mol_type = genomic DNA
accagatgttaattgattaatgg

SEQ ID NO: 9578 - DNA, 23 bp, Homo sapiens
  source 1..23: mol_type = genomic DNA
gagatttctttggcaataaatgg

SEQ ID NO: 9579 - DNA, 23 bp, Homo sapiens
  source 1..23: mol_type = genomic DNA
agacaggagagggactacgaagg

SEQ ID NO: 9580 - DNA, 23 bp, Homo sapiens
  source 1..23: mol_type = genomic DNA
gtagacctctttgtacaaggggg

SEQ ID NO: 9581 - DNA, 23 bp, Homo sapiens
  source 1..23: mol_type = genomic DNA
ataatgattaccatcccaagagg

SEQ ID NO: 9582 - DNA, 23 bp, Homo sapiens
  source 1..23: mol_type = genomic DNA
aatacctggacacaagctgaggg

SEQ ID NO: 9583 - DNA, 23 bp, Homo sapiens
  source 1..23: mol_type = genomic DNA
ataagttttaatgggcatggagg

SEQ ID NO: 9584 - DNA, 23 bp, Homo sapiens
  source 1..23: mol_type = genomic DNA
tagacaagaaagcatttgagggg

SEQ ID NO: 9585 - DNA, 23 bp, Homo sapiens
  source 1..23: mol_type = genomic DNA
gtttccaaggaagtcacaagagg

SEQ ID NO: 9586 - DNA, 23 bp, Homo sapiens
  source 1..23: mol_type = genomic DNA
ttaggaaatatagacaggagagg

SEQ ID NO: 9587 - DNA, 23 bp, Homo sapiens
  source 1..23: mol_type = genomic DNA
cttccagcccaatagtaacgggg

SEQ ID NO: 9588 - DNA, 23 bp, Homo sapiens
  source 1..23: mol_type = genomic DNA
aaaccatcatctatgacatgagg

SEQ ID NO: 9589 - DNA, 23 bp, Homo sapiens
  source 1..23: mol_type = genomic DNA
aggccatcacctcaatacatggg

SEQ ID NO: 9590 - DNA, 23 bp, Homo sapiens
  source 1..23: mol_type = genomic DNA
aaattatgagaccaccacctagg

SEQ ID NO: 9591 - DNA, 23 bp, Homo sapiens
  source 1..23: mol_type = genomic DNA
ggaaaagagaaattaaaaggagg

SEQ ID NO: 9592 - DNA, 23 bp, Homo sapiens
  source 1..23: mol_type = genomic DNA
atctccctgcctcatacacgagg

SEQ ID NO: 9593 - DNA, 23 bp, Homo sapiens
  source 1..23: mol_type = genomic DNA
gctgaaataagaagatcctgagg

SEQ ID NO: 9594 - DNA, 23 bp, Homo sapiens
  source 1..23: mol_type = genomic DNA
gtcaaactgtaggaaataagggg

SEQ ID NO: 9595 - DNA, 23 bp, Homo sapiens
  source 1..23: mol_type = genomic DNA
aagctgagttactaatcacaagg

SEQ ID NO: 9596 - DNA, 23 bp, Homo sapiens
  source 1..23: mol_type = genomic DNA
ggcagatcacataaaacaggagg

SEQ ID NO: 9597 - DNA, 23 bp, Homo sapiens
  source 1..23: mol_type = genomic DNA
aaaagatcagatggtcacaaagg

SEQ ID NO: 9598 - DNA, 23 bp, Homo sapiens
  source 1..23: mol_type = genomic DNA
tttgtgagccaagacatgagagg

SEQ ID NO: 9599 - DNA, 23 bp, Homo sapiens
  source 1..23: mol_type = genomic DNA
tcacatttcagggagcattgtgg

SEQ ID NO: 9600 - DNA, 23 bp, Homo sapiens
  source 1..23: mol_type = genomic DNA
atacaatgaagataaaatggagg

SEQ ID NO: 9601 - DNA, 23 bp, Homo sapiens
  source 1..23: mol_type = genomic DNA
tattcagcagctgaaccacaagg

SEQ ID NO: 9602 - DNA, 23 bp, Homo sapiens
  source 1..23: mol_type = genomic DNA
ttctttatatgagtacaactggg

SEQ ID NO: 9603 - DNA, 23 bp, Homo sapiens
  source 1..23: mol_type = genomic DNA
ctgccaaaagtatgaacaggagg

SEQ ID NO: 9604 - DNA, 23 bp, Homo sapiens
  source 1..23: mol_type = genomic DNA
tcagtaaagactgcttggagtgg

SEQ ID NO: 9605 - DNA, 23 bp, Homo sapiens
  source 1..23: mol_type = genomic DNA
ctgtttttgagctcacaggaagg

SEQ ID NO: 9606 - DNA, 23 bp, Homo sapiens
  source 1..23: mol_type = genomic DNA
taatacctggacacaagctgagg

SEQ ID NO: 9607 - DNA, 23 bp, Homo sapiens
  source 1..23: mol_type = genomic DNA
gtttgaccaatatattgaagggg

SEQ ID NO: 9608 - DNA, 23 bp, Homo sapiens
  source 1..23: mol_type = genomic DNA
agttctaccctatatttacaggg

SEQ ID NO: 9609 - DNA, 23 bp, Homo sapiens
  source 1..23: mol_type = genomic DNA
ggactgattcctttcatgtgagg

SEQ ID NO: 9610 - DNA, 23 bp, Homo sapiens
  source 1..23: mol_type = genomic DNA
tgtgagaagtattgaaacagagg

SEQ ID NO: 9611 - DNA, 23 bp, Homo sapiens
  source 1..23: mol_type = genomic DNA
atgtattgcaaagaagccatggg

SEQ ID NO: 9612 - DNA, 23 bp, Homo sapiens
  source 1..23: mol_type = genomic DNA
cagtcctcgtgtatgaggcaggg

SEQ ID NO: 9613 - DNA, 23 bp, Homo sapiens
  source 1..23: mol_type = genomic DNA
tttgccaagaggtaagggaaggg

SEQ ID NO: 9614 - DNA, 23 bp, Homo sapiens
  source 1..23: mol_type = genomic DNA
taataactcttgctatctggagg

SEQ ID NO: 9615 - DNA, 23 bp, Homo sapiens
  source 1..23: mol_type = genomic DNA
acatatctttacctatgtgaggg

SEQ ID NO: 9616 - DNA, 23 bp, Homo sapiens
  source 1..23: mol_type = genomic DNA
aacgttacaatcgtcatgagagg

SEQ ID NO: 9617 - DNA, 23 bp, Homo sapiens
  source 1..23: mol_type = genomic DNA
tgaaaaaataatcagctaggagg

SEQ ID NO: 9618 - DNA, 23 bp, Homo sapiens
  source 1..23: mol_type = genomic DNA
aatactgaaattgtaaacaatgg

SEQ ID NO: 9619 - DNA, 23 bp, Homo sapiens
  source 1..23: mol_type = genomic DNA
acaatgctagacataaacattgg

SEQ ID NO: 9620 - DNA, 23 bp, Homo sapiens
  source 1..23: mol_type = genomic DNA
cagtgttagatggtatgtagagg

SEQ ID NO: 9621 - DNA, 23 bp, Homo sapiens
  source 1..23: mol_type = genomic DNA
tttttatttaactaaacacaggg

SEQ ID NO: 9622 - DNA, 23 bp, Homo sapiens
  source 1..23: mol_type = genomic DNA
caacatgatatactgtgaagcgg

SEQ ID NO: 9623 - DNA, 23 bp, Homo sapiens
  source 1..23: mol_type = genomic DNA
agcatcctgatattattccaggg

SEQ ID NO: 9624 - DNA, 23 bp, Homo sapiens
  source 1..23: mol_type = genomic DNA
aaaaagtagtcccattccaaggg

SEQ ID NO: 9625 - DNA, 23 bp, Homo sapiens
  source 1..23: mol_type = genomic DNA
tttatggcagcaataatctgtgg

SEQ ID NO: 9626 - DNA, 23 bp, Homo sapiens
  source 1..23: mol_type = genomic DNA
atacatgctgtaatgcatgttgg

SEQ ID NO: 9627 - DNA, 23 bp, Homo sapiens
  source 1..23: mol_type = genomic DNA
gtcttgttgttggagaatggtgg

SEQ ID NO: 9628 - DNA, 23 bp, Homo sapiens
  source 1..23: mol_type = genomic DNA
tatgtttataaaaaattacaggg

SEQ ID NO: 9629 - DNA, 23 bp, Homo sapiens
  source 1..23: mol_type = genomic DNA
tctatattgagacaagtacatgg

SEQ ID NO: 9630 - DNA, 23 bp, Homo sapiens
  source 1..23: mol_type = genomic DNA
aatggcaatctttcttaacacgg

SEQ ID NO: 9631 - DNA, 23 bp, Homo sapiens
  source 1..23: mol_type = genomic DNA
aaaaaccaactccacaggcatgg

SEQ ID NO: 9632 - DNA, 23 bp, Homo sapiens
  source 1..23: mol_type = genomic DNA
gttgttggagaatggtggtgagg

SEQ ID NO: 9633 - DNA, 23 bp, Homo sapiens
  source 1..23: mol_type = genomic DNA
ggaactgagtgacttagagcagg

SEQ ID NO: 9634 - DNA, 23 bp, Homo sapiens
  source 1..23: mol_type = genomic DNA
catcacgtcaattgcctaggtgg

SEQ ID NO: 9635 - DNA, 23 bp, Homo sapiens
  source 1..23: mol_type = genomic DNA
atataagttggattgccagaagg

SEQ ID NO: 9636 - DNA, 23 bp, Homo sapiens
  source 1..23: mol_type = genomic DNA
gagctgtaacagttaactgtagg

SEQ ID NO: 9637 - DNA, 23 bp, Homo sapiens
  source 1..23: mol_type = genomic DNA
tatatcccccttgtacaaagagg

SEQ ID NO: 9638 - DNA, 23 bp, Homo sapiens
  source 1..23: mol_type = genomic DNA
aatggttaaaacctattgtgagg

SEQ ID NO: 9639 - DNA, 23 bp, Homo sapiens
  source 1..23: mol_type = genomic DNA
ttagttatactaacacatacggg

SEQ ID NO: 9640 - DNA, 23 bp, Homo sapiens
  source 1..23: mol_type = genomic DNA
agaattttatagaaaccttgtgg

SEQ ID NO: 9641 - DNA, 23 bp, Homo sapiens
  source 1..23: mol_type = genomic DNA
gcatactggtatttttcacgtgg

SEQ ID NO: 9642 - DNA, 23 bp, Homo sapiens
  source 1..23: mol_type = genomic DNA
ttttttagctgcctttccagtgg

SEQ ID NO: 9643 - DNA, 23 bp, Homo sapiens
  source 1..23: mol_type = genomic DNA
gagcaggcgaacaaaatgctggg

SEQ ID NO: 9644 - DNA, 23 bp, Homo sapiens
  source 1..23: mol_type = genomic DNA
tttttaaagaagtcaatccaggg

SEQ ID NO: 9645 - DNA, 23 bp, Homo sapiens
  source 1..23: mol_type = genomic DNA
aggcttacaatgagaaaagaggg

SEQ ID NO: 9646 - DNA, 23 bp, Homo sapiens
  source 1..23: mol_type = genomic DNA
gccttgtgctaccatgcctgtgg

SEQ ID NO: 9647 - DNA, 23 bp, Homo sapiens
  source 1..23: mol_type = genomic DNA
actttctttgcatacagtggagg

SEQ ID NO: 9648 - DNA, 23 bp, Homo sapiens
  source 1..23: mol_type = genomic DNA
acatctgataagtagcacttagg

SEQ ID NO: 9649 - DNA, 23 bp, Homo sapiens
  source 1..23: mol_type = genomic DNA
ttggttcactgaaatagcaaggg

SEQ ID NO: 9650 - DNA, 23 bp, Homo sapiens
  source 1..23: mol_type = genomic DNA
gcctttccagtggcaaaagtagg

SEQ ID NO: 9651 - DNA, 23 bp, Homo sapiens
  source 1..23: mol_type = genomic DNA
taggaaatatagacaggagaggg

SEQ ID NO: 9652 - DNA, 23 bp, Homo sapiens
  source 1..23: mol_type = genomic DNA
agacatcacgtcaattgcctagg

SEQ ID NO: 9653 - DNA, 23 bp, Homo sapiens
  source 1..23: mol_type = genomic DNA
aaattcatagctcaatgcacagg

SEQ ID NO: 9654 - DNA, 23 bp, Homo sapiens
  source 1..23: mol_type = genomic DNA
ttatggtatatgaatgtggatgg

SEQ ID NO: 9655 - DNA, 23 bp, Homo sapiens
  source 1..23: mol_type = genomic DNA
aacatcctatccctattcaaagg

SEQ ID NO: 9656 - DNA, 23 bp, Homo sapiens
  source 1..23: mol_type = genomic DNA
actgtgattgaaaatcatatagg

SEQ ID NO: 9657 - DNA, 23 bp, Homo sapiens
  source 1..23: mol_type = genomic DNA
gctggaagaaattcactctaggg

SEQ ID NO: 9658 - DNA, 23 bp, Homo sapiens
  source 1..23: mol_type = genomic DNA
ttgtagacctctttgtacaaggg

SEQ ID NO: 9659 - DNA, 23 bp, Homo sapiens
  source 1..23: mol_type = genomic DNA
gtatgtagaggaaggccagatgg

SEQ ID NO: 9660 - DNA, 23 bp, Homo sapiens
  source 1..23: mol_type = genomic DNA
gatggatgaactgttgcccccgg

SEQ ID NO: 9661 - DNA, 23 bp, Homo sapiens
  source 1..23: mol_type = genomic DNA
tccttgggcaaaagatcagatgg

SEQ ID NO: 9662 - DNA, 23 bp, Homo sapiens
  source 1..23: mol_type = genomic DNA
gctcctttgcttgtaaccagagg

SEQ ID NO: 9663 - DNA, 23 bp, Homo sapiens
  source 1..23: mol_type = genomic DNA
acacattctataattagggatgg

SEQ ID NO: 9664 - DNA, 23 bp, Homo sapiens
  source 1..23: mol_type = genomic DNA
aatcacatgtgctgttgaaaggg

SEQ ID NO: 9665 - DNA, 23 bp, Homo sapiens
  source 1..23: mol_type = genomic DNA
gaactgccatgtacaagaagagg

SEQ ID NO: 9666 - DNA, 23 bp, Homo sapiens
  source 1..23: mol_type = genomic DNA
aagtttgtagtattgcctccagg

SEQ ID NO: 9667 - DNA, 23 bp, Homo sapiens
  source 1..23: mol_type = genomic DNA
ccattctccaacaacaagacagg

SEQ ID NO: 9668 - DNA, 23 bp, Homo sapiens
  source 1..23: mol_type = genomic DNA
tgtccaaagccaagaaacattgg

SEQ ID NO: 9669 - DNA, 23 bp, Homo sapiens
  source 1..23: mol_type = genomic DNA
cctgttcatacttttggcagcgg

SEQ ID NO: 9670 - DNA, 23 bp, Homo sapiens
  source 1..23: mol_type = genomic DNA
ttattatgtaatgattgtgtggg

SEQ ID NO: 9671 - DNA, 23 bp, Homo sapiens
  source 1..23: mol_type = genomic DNA
ttacagacaatgcatttacaagg

SEQ ID NO: 9672 - DNA, 23 bp, Homo sapiens
  source 1..23: mol_type = genomic DNA
agtttgaccaatatattgaaggg

SEQ ID NO: 9673 - DNA, 23 bp, Homo sapiens
  source 1..23: mol_type = genomic DNA
atgtaatcttatgagtaagaagg

SEQ ID NO: 9674 - DNA, 23 bp, Homo sapiens
  source 1..23: mol_type = genomic DNA
gatttgacttgaataatacctgg

SEQ ID NO: 9675 - DNA, 23 bp, Homo sapiens
  source 1..23: mol_type = genomic DNA
ctgcaagaagaggcacaccctgg

SEQ ID NO: 9676 - DNA, 23 bp, Homo sapiens
  source 1..23: mol_type = genomic DNA
tggaagcaatgggtacatatggg

SEQ ID NO: 9677 - DNA, 23 bp, Homo sapiens
  source 1..23: mol_type = genomic DNA
tggatacatgtgcccatggaggg

SEQ ID NO: 9678 - DNA, 23 bp, Homo sapiens
  source 1..23: mol_type = genomic DNA
tcactcaatgcattagaatgagg

SEQ ID NO: 9679 - DNA, 23 bp, Homo sapiens
  source 1..23: mol_type = genomic DNA
tgtatgctacattcagctatggg

SEQ ID NO: 9680 - DNA, 23 bp, Homo sapiens
  source 1..23: mol_type = genomic DNA
ggcaatccaacttatatgcaagg

SEQ ID NO: 9681 - DNA, 23 bp, Homo sapiens
  source 1..23: mol_type = genomic DNA
ttcttatttctccatcccgaagg

SEQ ID NO: 9682 - DNA, 23 bp, Homo sapiens
  source 1..23: mol_type = genomic DNA
tgccgaagcaagcacctgatggg

SEQ ID NO: 9683 - DNA, 23 bp, Homo sapiens
  source 1..23: mol_type = genomic DNA
atatatatcgatcagggccaagg

SEQ ID NO: 9684 - DNA, 23 bp, Homo sapiens
  source 1..23: mol_type = genomic DNA
tgtagttcagtgtgtctggaggg

SEQ ID NO: 9685 - DNA, 23 bp, Homo sapiens
  source 1..23: mol_type = genomic DNA
tttggttcactgaaatagcaagg

SEQ ID NO: 9686 - DNA, 23 bp, Homo sapiens
  source 1..23: mol_type = genomic DNA
aataccctcagcttgtgtccagg

SEQ ID NO: 9687 - DNA, 23 bp, Homo sapiens
  source 1..23: mol_type = genomic DNA
ctatcttttctaaacgctcaggg

SEQ ID NO: 9688 - DNA, 23 bp, Homo sapiens
  source 1..23: mol_type = genomic DNA
ctgcctctggttacaagcaaagg

SEQ ID NO: 9689 - DNA, 23 bp, Homo sapiens
  source 1..23: mol_type = genomic DNA
gagaagataaaacctgtgcttgg

SEQ ID NO: 9690 - DNA, 23 bp, Homo sapiens
  source 1..23: mol_type = genomic DNA
gaccttttgaagcagttgcatgg

SEQ ID NO: 9691 - DNA, 23 bp, Homo sapiens
  source 1..23: mol_type = genomic DNA
ttacctatgtgagggactgaagg

SEQ ID NO: 9692 - DNA, 23 bp, Homo sapiens
  source 1..23: mol_type = genomic DNA
tgagcgtttagaaaagatagtgg

SEQ ID NO: 9693 - DNA, 23 bp, Homo sapiens
  source 1..23: mol_type = genomic DNA
atagacaagaaagcatttgaggg

SEQ ID NO: 9694 - DNA, 23 bp, Homo sapiens
  source 1..23: mol_type = genomic DNA
ttttgtcttatgtagttggatgg

SEQ ID NO: 9695 - DNA, 23 bp, Homo sapiens
  source 1..23: mol_type = genomic DNA
atggcttctttgcaatacattgg

SEQ ID NO: 9696 - DNA, 23 bp, Homo sapiens
  source 1..23: mol_type = genomic DNA
agtctcctttgaatagggatagg

SEQ ID NO: 9697 - DNA, 23 bp, Homo sapiens
  source 1..23: mol_type = genomic DNA
tgagcatagctgataagagttgg

SEQ ID NO: 9698 - DNA, 23 bp, Homo sapiens
  source 1..23: mol_type = genomic DNA
ggatggatattatcaagtatagg

SEQ ID NO: 9699 - DNA, 23 bp, Homo sapiens
  source 1..23: mol_type = genomic DNA
tataactgcatgaattagcttgg

SEQ ID NO: 9700 - DNA, 23 bp, Homo sapiens
  source 1..23: mol_type = genomic DNA
atattatcaagtataggcttagg

SEQ ID NO: 9701 - DNA, 23 bp, Homo sapiens
  source 1..23: mol_type = genomic DNA
tggtggtctcataatttctaggg

SEQ ID NO: 9702 - DNA, 23 bp, Homo sapiens
  source 1..23: mol_type = genomic DNA
tttctacatttgccaagcacagg

SEQ ID NO: 9703 - DNA, 23 bp, Homo sapiens
  source 1..23: mol_type = genomic DNA
tgattgaaaatcatataggctgg

SEQ ID NO: 9704 - DNA, 23 bp, Homo sapiens
  source 1..23: mol_type = genomic DNA
ttcttccagcccaatagtaacgg

SEQ ID NO: 9705 - DNA, 23 bp, Homo sapiens
  source 1..23: mol_type = genomic DNA
tgagttcccatattcatcactgg

SEQ ID NO: 9706 - DNA, 23 bp, Homo sapiens
  source 1..23: mol_type = genomic DNA
atgtacttgtctcaatatagagg

SEQ ID NO: 9707 - DNA, 23 bp, Homo sapiens
  source 1..23: mol_type = genomic DNA
aatttgcctcttcttgtacatgg

SEQ ID NO: 9708 - DNA, 23 bp, Homo sapiens
  source 1..23: mol_type = genomic DNA
ggaatcagtcctcgtgtatgagg

SEQ ID NO: 9709 - DNA, 23 bp, Homo sapiens
  source 1..23: mol_type = genomic DNA
ttgggtataataaaaagcactgg

SEQ ID NO: 9710 - DNA, 23 bp, Homo sapiens
  source 1..23: mol_type = genomic DNA
tgtgttattttgataggcctggg

SEQ ID NO: 9711 - DNA, 23 bp, Homo sapiens
  source 1..23: mol_type = genomic DNA
ctacttcatttccttcgggatgg

SEQ ID NO: 9712 - DNA, 23 bp, Homo sapiens
  source 1..23: mol_type = genomic DNA
agagcaggcgaacaaaatgctgg

SEQ ID NO: 9713 - DNA, 23 bp, Homo sapiens
  source 1..23: mol_type = genomic DNA
tctatgtatatgtaaccctttgg

SEQ ID NO: 9714 - DNA, 23 bp, Homo sapiens
  source 1..23: mol_type = genomic DNA
tgttttatgtgatctgcccatgg

SEQ ID NO: 9715 - DNA, 23 bp, Homo sapiens
  source 1..23: mol_type = genomic DNA
gaggccatcacctcaatacatgg

SEQ ID NO: 9716 - DNA, 23 bp, Homo sapiens
  source 1..23: mol_type = genomic DNA
gcaataatctgtggaagcaatgg

SEQ ID NO: 9717 - DNA, 23 bp, Homo sapiens
  source 1..23: mol_type = genomic DNA
atgtgcattttttaaacaagtgg

SEQ ID NO: 9718 - DNA, 23 bp, Homo sapiens
  source 1..23: mol_type = genomic DNA
ttattctgattgtatgaagtagg

SEQ ID NO: 9719 - DNA, 23 bp, Homo sapiens
  source 1..23: mol_type = genomic DNA
ctgaatttgccaagaggtaaggg

SEQ ID NO: 9720 - DNA, 23 bp, Homo sapiens
  source 1..23: mol_type = genomic DNA
aacttattgatcactccaaaggg

SEQ ID NO: 9721 - DNA, 23 bp, Homo sapiens
  source 1..23: mol_type = genomic DNA
atgctccctgaaatgtgaaaagg

SEQ ID NO: 9722 - DNA, 23 bp, Homo sapiens
  source 1..23: mol_type = genomic DNA
ggagttttaaatctcccatcagg

SEQ ID NO: 9723 - DNA, 23 bp, Homo sapiens
  source 1..23: mol_type = genomic DNA
gttccccgttactattgggctgg

SEQ ID NO: 9724 - DNA, 23 bp, Homo sapiens
  source 1..23: mol_type = genomic DNA
atcgtccctattttgccgtaagg

SEQ ID NO: 9725 - DNA, 23 bp, Homo sapiens
  source 1..23: mol_type = genomic DNA
cctaaacatgtcccttaaaaggg

SEQ ID NO: 9726 - DNA, 23 bp, Homo sapiens
  source 1..23: mol_type = genomic DNA
atatgtattttatcttaaagagg

SEQ ID NO: 9727 - DNA, 23 bp, Homo sapiens
  source 1..23: mol_type = genomic DNA
caactacataagacaaaaagagg

SEQ ID NO: 9728 - DNA, 23 bp, Homo sapiens
  source 1..23: mol_type = genomic DNA
tgaactttgggagaatccttggg

SEQ ID NO: 9729 - DNA, 23 bp, Homo sapiens
  source 1..23: mol_type = genomic DNA
catttccctttaccctccatggg

SEQ ID NO: 9730 - DNA, 23 bp, Homo sapiens
  source 1..23: mol_type = genomic DNA
tgccatgcaactgcttcaaaagg

SEQ ID NO: 9731 - DNA, 23 bp, Homo sapiens
  source 1..23: mol_type = genomic DNA
ctgttcatacttttggcagcggg

SEQ ID NO: 9732 - DNA, 23 bp, Homo sapiens
  source 1..23: mol_type = genomic DNA
acattttctataatgattgtggg

SEQ ID NO: 9733 - DNA, 23 bp, Homo sapiens
  source 1..23: mol_type = genomic DNA
atattatatgataattaagaagg

SEQ ID NO: 9734 - DNA, 23 bp, Homo sapiens
  source 1..23: mol_type = genomic DNA
gtggagttggtttttaagcatgg

SEQ ID NO: 9735 - DNA, 23 bp, Homo sapiens
  source 1..23: mol_type = genomic DNA
tcagtcctcgtgtatgaggcagg

SEQ ID NO: 9736 - DNA, 23 bp, Homo sapiens
  source 1..23: mol_type = genomic DNA
caggatatagatgatatagaagg

SEQ ID NO: 9737 - DNA, 23 bp, Homo sapiens
  source 1..23: mol_type = genomic DNA
gcacaccctggaataatatcagg

SEQ ID NO: 9738 - DNA, 23 bp, Homo sapiens
  source 1..23: mol_type = genomic DNA
actgatttgattattccaattgg

SEQ ID NO: 9739 - DNA, 23 bp, Homo sapiens
  source 1..23: mol_type = genomic DNA
aacagaccttgcatataagttgg

SEQ ID NO: 9740 - DNA, 23 bp, Homo sapiens
  source 1..23: mol_type = genomic DNA
gagcatagtttgtttttcccagg

SEQ ID NO: 9741 - DNA, 23 bp, Homo sapiens
  source 1..23: mol_type = genomic DNA
tctagttcatttgcattgcatgg

SEQ ID NO: 9742 - DNA, 23 bp, Homo sapiens
  source 1..23: mol_type = genomic DNA
ttttgggcatccttgaatgtagg

SEQ ID NO: 9743 - DNA, 23 bp, Homo sapiens
  source 1..23: mol_type = genomic DNA
atgtgcccatggagggtaaaggg

SEQ ID NO: 9744 - DNA, 23 bp, Homo sapiens
  source 1..23: mol_type = genomic DNA
acatattctgccacatagcctgg

SEQ ID NO: 9745 - DNA, 23 bp, Homo sapiens
  source 1..23: mol_type = genomic DNA
ctttatcttatgaagtatagagg

SEQ ID NO: 9746 - DNA, 23 bp, Homo sapiens
  source 1..23: mol_type = genomic DNA
gagaaactgttcttgcttgttgg

SEQ ID NO: 9747 - DNA, 23 bp, Homo sapiens
  source 1..23: mol_type = genomic DNA
acacagggcaaaaactaatctgg

SEQ ID NO: 9748 - DNA, 23 bp, Homo sapiens
  source 1..23: mol_type = genomic DNA
gcattcaccctgtaaatataggg

SEQ ID NO: 9749 - DNA, 23 bp, Homo sapiens
  source 1..23: mol_type = genomic DNA
tctcaaatacctattatagttgg

SEQ ID NO: 9750 - DNA, 23 bp, Homo sapiens
  source 1..23: mol_type = genomic DNA
aatatcttatagaagaactttgg

SEQ ID NO: 9751 - DNA, 23 bp, Homo sapiens
  source 1..23: mol_type = genomic DNA
atagtactaaaactactattagg

SEQ ID NO: 9752 - DNA, 23 bp, Homo sapiens
  source 1..23: mol_type = genomic DNA
tcttccagcccaatagtaacggg

SEQ ID NO: 9753 - DNA, 23 bp, Homo sapiens
  source 1..23: mol_type = genomic DNA
agttacatctcaaataactttgg

SEQ ID NO: 9754 - DNA, 23 bp, Homo sapiens
  source 1..23: mol_type = genomic DNA
aggaaccttacggcaaaataggg

SEQ ID NO: 9755 - DNA, 23 bp, Homo sapiens
  source 1..23: mol_type = genomic DNA
aatgttctaggcaatggaattgg

SEQ ID NO: 9756 - DNA, 23 bp, Homo sapiens
  source 1..23: mol_type = genomic DNA
gcacaaatgttctatgagattgg

SEQ ID NO: 9757 - DNA, 23 bp, Homo sapiens
  source 1..23: mol_type = genomic DNA
gcagttttttctaattgccttgg

SEQ ID NO: 9758 - DNA, 23 bp, Homo sapiens
  source 1..23: mol_type = genomic DNA
atctggttgcttcttttgtaggg

SEQ ID NO: 9759 - DNA, 23 bp, Homo sapiens
  source 1..23: mol_type = genomic DNA
ttgacgtgcatcccttttaaggg

SEQ ID NO: 9760 - DNA, 23 bp, Homo sapiens
  source 1..23: mol_type = genomic DNA
ttcattacttcagtgttagatgg

SEQ ID NO: 9761 - DNA, 23 bp, Homo sapiens
  source 1..23: mol_type = genomic DNA
aattaagtctcctttgaataggg

SEQ ID NO: 9762 - DNA, 23 bp, Homo sapiens
  source 1..23: mol_type = genomic DNA
agtgatcaataagttttaatggg

SEQ ID NO: 9763 - DNA, 23 bp, Homo sapiens
  source 1..23: mol_type = genomic DNA
ggattgatccaaatctttgctgg

SEQ ID NO: 9764 - DNA, 23 bp, Homo sapiens
  source 1..23: mol_type = genomic DNA
atttatttctagcccacaatagg

SEQ ID NO: 9765 - DNA, 23 bp, Homo sapiens
  source 1..23: mol_type = genomic DNA
gggtatttaagttgattagaagg

SEQ ID NO: 9766 - DNA, 23 bp, Homo sapiens
  source 1..23: mol_type = genomic DNA
atagtctgtagcatgataattgg

SEQ ID NO: 9767 - DNA, 23 bp, Homo sapiens
  source 1..23: mol_type = genomic DNA
gtttaattaaaaatactctaagg

SEQ ID NO: 9768 - DNA, 23 bp, Homo sapiens
  source 1..23: mol_type = genomic DNA
tgaaacacattctataattaggg

SEQ ID NO: 9769 - DNA, 23 bp, Homo sapiens
  source 1..23: mol_type = genomic DNA
aatactacttcatttccttcggg

SEQ ID NO: 9770 - DNA, 23 bp, Homo sapiens
  source 1..23: mol_type = genomic DNA
atacttttggcagcgggccgggg

SEQ ID NO: 9771 - DNA, 23 bp, Homo sapiens
  source 1..23: mol_type = genomic DNA
ggtcaaactgtaggaaataaggg

SEQ ID NO: 9772 - DNA, 23 bp, Homo sapiens
  source 1..23: mol_type = genomic DNA
attattgtcaaatacttagaagg

SEQ ID NO: 9773 - DNA, 23 bp, Homo sapiens
  source 1..23: mol_type = genomic DNA
agattattgctgccataaaatgg

SEQ ID NO: 9774 - DNA, 23 bp, Homo sapiens
  source 1..23: mol_type = genomic DNA
tgttttatctgacttaagtttgg

SEQ ID NO: 9775 - DNA, 23 bp, Homo sapiens
  source 1..23: mol_type = genomic DNA
tcatgtactaaatttccttatgg

SEQ ID NO: 9776 - DNA, 23 bp, Homo sapiens
  source 1..23: mol_type = genomic DNA
gtatctcttcacttgctcatagg

SEQ ID NO: 9777 - DNA, 23 bp, Homo sapiens
  source 1..23: mol_type = genomic DNA
gtgggctagaaataaataaaagg

SEQ ID NO: 9778 - DNA, 23 bp, Homo sapiens
  source 1..23: mol_type = genomic DNA
ttagcgccccttcaatatattgg

SEQ ID NO: 9779 - DNA, 23 bp, Homo sapiens
  source 1..23: mol_type = genomic DNA
gtatgtttataaaaaattacagg

SEQ ID NO: 9780 - DNA, 23 bp, Homo sapiens
  source 1..23: mol_type = genomic DNA
aagaaaatgcagtttttagtagg

SEQ ID NO: 9781 - DNA, 23 bp, Homo sapiens
  source 1..23: mol_type = genomic DNA
tttttttgtcaggagataatagg

SEQ ID NO: 9782 - DNA, 23 bp, Homo sapiens
  source 1..23: mol_type = genomic DNA
tagaattctttgattgactatgg

SEQ ID NO: 9783 - DNA, 23 bp, Homo sapiens
  source 1..23: mol_type = genomic DNA
ctcagttccccgttactattggg

SEQ ID NO: 9784 - DNA, 23 bp, Homo sapiens
  source 1..23: mol_type = genomic DNA
atccttttagcctaccaaaatgg

SEQ ID NO: 9785 - DNA, 23 bp, Homo sapiens
  source 1..23: mol_type = genomic DNA
gtatttttaattaaacttactgg

SEQ ID NO: 9786 - DNA, 23 bp, Homo sapiens
  source 1..23: mol_type = genomic DNA
ttacctcctgttcatacttttgg

SEQ ID NO: 9787 - DNA, 23 bp, Homo sapiens
  source 1..23: mol_type = genomic DNA
tcttatttcagcttccaaattgg

SEQ ID NO: 9788 - DNA, 23 bp, Homo sapiens
  source 1..23: mol_type = genomic DNA
ataatatgtaaataattaaatgg

SEQ ID NO: 9789 - DNA, 23 bp, Homo sapiens
  source 1..23: mol_type = genomic DNA
actagtcgtggagagctttcagg

SEQ ID NO: 9790 - DNA, 23 bp, Homo sapiens
  source 1..23: mol_type = genomic DNA
ttgctatctccaactataatagg

SEQ ID NO: 9791 - DNA, 23 bp, Homo sapiens
  source 1..23: mol_type = genomic DNA
agtctcacaaaactgcagagcgg

SEQ ID NO: 9792 - DNA, 23 bp, Homo sapiens
  source 1..23: mol_type = genomic DNA
gctttgtggagtcaacaccatgg

SEQ ID NO: 9793 - DNA, 23 bp, Homo sapiens
  source 1..23: mol_type = genomic DNA
taacctattcataagcacagagg

SEQ ID NO: 9794 - DNA, 23 bp, Homo sapiens
  source 1..23: mol_type = genomic DNA
atggtttagacacagaactgggg

SEQ ID NO: 9795 - DNA, 23 bp, Homo sapiens
  source 1..23: mol_type = genomic DNA
cttcagatgatacaaaaacgggg

SEQ ID NO: 9796 - DNA, 23 bp, Homo sapiens
  source 1..23: mol_type = genomic DNA
caaggagtgtgaaaacacgtggg

SEQ ID NO: 9797 - DNA, 23 bp, Homo sapiens
  source 1..23: mol_type = genomic DNA
ctgagccatatacctcactgtgg

SEQ ID NO: 9798 - DNA, 23 bp, Homo sapiens
  source 1..23: mol_type = genomic DNA
acagaactagagatgtcaggtgg

SEQ ID NO: 9799 - DNA, 23 bp, Homo sapiens
  source 1..23: mol_type = genomic DNA
aacaatgtgacagatgacagagg

SEQ ID NO: 9800 - DNA, 23 bp, Homo sapiens
  source 1..23: mol_type = genomic DNA
gtgaatttgaaagtgactggtgg

SEQ ID NO: 9801 - DNA, 23 bp, Homo sapiens
  source 1..23: mol_type = genomic DNA
gcaaaaactgcatgacccagagg

SEQ ID NO: 9802 - DNA, 23 bp, Homo sapiens
  source 1..23: mol_type = genomic DNA
gggcagttctctccacagtgagg

SEQ ID NO: 9803 - DNA, 23 bp, Homo sapiens
  source 1..23: mol_type = genomic DNA
ctataggtgataaactactgtgg

SEQ ID NO: 9804 - DNA, 23 bp, Homo sapiens
  source 1..23: mol_type = genomic DNA
actcagggagagtacatgggagg

SEQ ID NO: 9805 - DNA, 23 bp, Homo sapiens
  source 1..23: mol_type = genomic DNA
ccatgtggaaacaagcagagagg

SEQ ID NO: 9806 - DNA, 23 bp, Homo sapiens
  source 1..23: mol_type = genomic DNA
gatgacttggaccctgtgggagg

SEQ ID NO: 9807 - DNA, 23 bp, Homo sapiens
  source 1..23: mol_type = genomic DNA
tccaagcactctactcacgatgg

SEQ ID NO: 9808 - DNA, 23 bp, Homo sapiens
  source 1..23: mol_type = genomic DNA
aagatggaggaagattgtggtgg

SEQ ID NO: 9809 - DNA, 23 bp, Homo sapiens
  source 1..23: mol_type = genomic DNA
tagccaagctgacacaaccaggg

SEQ ID NO: 9810 - DNA, 23 bp, Homo sapiens
  source 1..23: mol_type = genomic DNA
ttcaaaatatcaaaagcctgggg

SEQ ID NO: 9811 - DNA, 23 bp, Homo sapiens
  source 1..23: mol_type = genomic DNA
ggtctgagtaggatccgggaagg

SEQ ID NO: 9812 - DNA, 23 bp, Homo sapiens
  source 1..23: mol_type = genomic DNA
aaaacagaccaggtgaactgagg

SEQ ID NO: 9813 - DNA, 23 bp, Homo sapiens
  source 1..23: mol_type = genomic DNA
aagcatgactctccaaactgtgg

SEQ ID NO: 9814 - DNA, 23 bp, Homo sapiens
  source 1..23: mol_type = genomic DNA
actgacattacaggtacccgagg

SEQ ID NO: 9815 - DNA, 23 bp, Homo sapiens
  source 1..23: mol_type = genomic DNA
gtgtacctcaaaatggctgaagg

SEQ ID NO: 9816 - DNA, 23 bp, Homo sapiens
  source 1..23: mol_type = genomic DNA
agatggaggaagattgtggtggg

SEQ ID NO: 9817 - DNA, 23 bp, Homo sapiens
  source 1..23: mol_type = genomic DNA
catgccagcctagtaccttgagg

SEQ ID NO: 9818 - DNA, 23 bp, Homo sapiens
  source 1..23: mol_type = genomic DNA
tattacaacatagcaaggcgagg

SEQ ID NO: 9819 - DNA, 23 bp, Homo sapiens
  source 1..23: mol_type = genomic DNA
tatcttccccccttccacagagg

SEQ ID NO: 9820 - DNA, 23 bp, Homo sapiens
  source 1..23: mol_type = genomic DNA
agaacacagtgcccatcaggagg

SEQ ID NO: 9821 - DNA, 23 bp, Homo sapiens
  source 1..23: mol_type = genomic DNA
attttactagggcagtggtgagg

SEQ ID NO: 9822 - DNA, 23 bp, Homo sapiens
  source 1..23: mol_type = genomic DNA
cttcccagtctatgaaaccaagg

SEQ ID NO: 9823 - DNA, 23 bp, Homo sapiens
  source 1..23: mol_type = genomic DNA
ggcactcagggagagtacatggg

SEQ ID NO: 9824 - DNA, 23 bp, Homo sapiens
  source 1..23: mol_type = genomic DNA
aaagtgacaattcattgcagggg

SEQ ID NO: 9825 - DNA, 23 bp, Homo sapiens
  source 1..23: mol_type = genomic DNA
agtgatattattgtacacgtagg

SEQ ID NO: 9826 - DNA, 23 bp, Homo sapiens
  source 1..23: mol_type = genomic DNA
gatgatgacttggaccctgtggg

SEQ ID NO: 9827 - DNA, 23 bp, Homo sapiens
  source 1..23: mol_type = genomic DNA
gaaatacgttaaccattgcaggg

SEQ ID NO: 9828 - DNA, 23 bp, Homo sapiens
  source 1..23: mol_type = genomic DNA
attgataattgtctacagggtgg

SEQ ID NO: 9829 - DNA, 23 bp, Homo sapiens
  source 1..23: mol_type = genomic DNA
ctgaggtagctacaaaacctggg

SEQ ID NO: 9830 - DNA, 23 bp, Homo sapiens
  source 1..23: mol_type = genomic DNA
tgtaagtgtgtctccctctgtgg

SEQ ID NO: 9831 - DNA, 23 bp, Homo sapiens
  source 1..23: mol_type = genomic DNA
tttcaggaaagagtggctagtgg

SEQ ID NO: 9832 - DNA, 23 bp, Homo sapiens
  source 1..23: mol_type = genomic DNA
tcataaggaaagagaatcagggg

SEQ ID NO: 9833 - DNA, 23 bp, Homo sapiens
  source 1..23: mol_type = genomic DNA
gcaaggcgaggaatttccgaagg

SEQ ID NO: 9834 - DNA, 23 bp, Homo sapiens
  source 1..23: mol_type = genomic DNA
agtcatcatccaatgcatggtgg

SEQ ID NO: 9835 - DNA, 23 bp, Homo sapiens
  source 1..23: mol_type = genomic DNA
attgctggcataaagagatgagg

SEQ ID NO: 9836 - DNA, 23 bp, Homo sapiens
  source 1..23: mol_type = genomic DNA
gaatgccataggaagcacttggg

SEQ ID NO: 9837 - DNA, 23 bp, Homo sapiens
  source 1..23: mol_type = genomic DNA
gccaggctcgaatcaatgagagg

SEQ ID NO: 9838 - DNA, 23 bp, Homo sapiens
  source 1..23: mol_type = genomic DNA
tcattgactctagtgtcccatgg

SEQ ID NO: 9839 - DNA, 23 bp, Homo sapiens
  source 1..23: mol_type = genomic DNA
tgtcctcaaggataatgtagagg

SEQ ID NO: 9840 - DNA, 23 bp, Homo sapiens
  source 1..23: mol_type = genomic DNA
agagatctttggagccaccaggg

SEQ ID NO: 9841 - DNA, 23 bp, Homo sapiens
  source 1..23: mol_type = genomic DNA
catctcagcaaagatatctgagg

SEQ ID NO: 9842 - DNA, 23 bp, Homo sapiens
  source 1..23: mol_type = genomic DNA
atctctttatgccagcaatgagg

SEQ ID NO: 9843 - DNA, 23 bp, Homo sapiens
  source 1..23: mol_type = genomic DNA
tgacattttagaatttgtggggg

SEQ ID NO: 9844 - DNA, 23 bp, Homo sapiens
  source 1..23: mol_type = genomic DNA
attagaatttgtgtataccaggg

SEQ ID NO: 9845 - DNA, 23 bp, Homo sapiens
  source 1..23: mol_type = genomic DNA
atgcctctacattatccttgagg

SEQ ID NO: 9846 - DNA, 23 bp, Homo sapiens
  source 1..23: mol_type = genomic DNA
agagacttagagcccaacttggg

SEQ ID NO: 9847 - DNA, 23 bp, Homo sapiens
  source 1..23: mol_type = genomic DNA
aaagagatgaggctatccactgg

SEQ ID NO: 9848 - DNA, 23 bp, Homo sapiens
  source 1..23: mol_type = genomic DNA
tctcatatttatgagtcagaggg

SEQ ID NO: 9849 - DNA, 23 bp, Homo sapiens
  source 1..23: mol_type = genomic DNA
tttgcatttgatgaacattgagg

SEQ ID NO: 9850 - DNA, 23 bp, Homo sapiens
  source 1..23: mol_type = genomic DNA
aaagaatcaggagtccgtaaggg

SEQ ID NO: 9851 - DNA, 23 bp, Homo sapiens
  source 1..23: mol_type = genomic DNA
aagagacaggtttctgaccaggg

SEQ ID NO: 9852 - DNA, 23 bp, Homo sapiens
  source 1..23: mol_type = genomic DNA
gttctcgtaaactaccaggatgg

SEQ ID NO: 9853 - DNA, 23 bp, Homo sapiens
  source 1..23: mol_type = genomic DNA
agatagtctaaatcaaatgaggg

SEQ ID NO: 9854 - DNA, 23 bp, Homo sapiens
  source 1..23: mol_type = genomic DNA
tgaaactcaaacgtgcctcaagg

SEQ ID NO: 9855 - DNA, 23 bp, Homo sapiens
  source 1..23: mol_type = genomic DNA
tatgcgaacaaaacttacatggg

SEQ ID NO: 9856 - DNA, 23 bp, Homo sapiens
  source 1..23: mol_type = genomic DNA
attctgtctgcttaccctggagg

SEQ ID NO: 9857 - DNA, 23 bp, Homo sapiens
  source 1..23: mol_type = genomic DNA
ggatgatgacttggaccctgtgg

SEQ ID NO: 9858 - DNA, 23 bp, Homo sapiens
  source 1..23: mol_type = genomic DNA
gatctgtgtgatactcccatagg

SEQ ID NO: 9859 - DNA, 23 bp, Homo sapiens
  source 1..23: mol_type = genomic DNA
aactggggctcagctcacactgg

SEQ ID NO: 9860 - DNA, 23 bp, Homo sapiens
  source 1..23: mol_type = genomic DNA
attattaaagatcatcaggatgg

SEQ ID NO: 9861 - DNA, 23 bp, Homo sapiens
  source 1..23: mol_type = genomic DNA
aataaatgtgggtcactagaggg

SEQ ID NO: 9862 - DNA, 23 bp, Homo sapiens
  source 1..23: mol_type = genomic DNA
cccagaactctaagagatggtgg

SEQ ID NO: 9863 - DNA, 23 bp, Homo sapiens
  source 1..23: mol_type = genomic DNA
gtttaaataacttccaacccggg

SEQ ID NO: 9864 - DNA, 23 bp, Homo sapiens
  source 1..23: mol_type = genomic DNA
ttgtaaagtcccatcatacaggg

SEQ ID NO: 9865 - DNA, 23 bp, Homo sapiens
  source 1..23: mol_type = genomic DNA
ttactgacattcagtgacatggg

SEQ ID NO: 9866 - DNA, 23 bp, Homo sapiens
  source 1..23: mol_type = genomic DNA
ggaaactcaactttctcctgggg

SEQ ID NO: 9867 - DNA, 23 bp, Homo sapiens
  source 1..23: mol_type = genomic DNA
agtttaaattgcctcccacaggg

SEQ ID NO: 9868 - DNA, 23 bp, Homo sapiens
  source 1..23: mol_type = genomic DNA
ctactgataaatttaaagagcgg

SEQ ID NO: 9869 - DNA, 23 bp, Homo sapiens
  source 1..23: mol_type = genomic DNA
tagatagttaagaaactatgtgg

SEQ ID NO: 9870 - DNA, 23 bp, Homo sapiens
  source 1..23: mol_type = genomic DNA
tcatgttctcgtaaactaccagg

SEQ ID NO: 9871 - DNA, 23 bp, Homo sapiens
  source 1..23: mol_type = genomic DNA
actcccagaactctaagagatgg

SEQ ID NO: 9872 - DNA, 23 bp, Homo sapiens
  source 1..23: mol_type = genomic DNA
ttgatttcatgggaaacaggtgg

SEQ ID NO: 9873 - DNA, 23 bp, Homo sapiens
  source 1..23: mol_type = genomic DNA
tttatgaacgctttacttggggg

SEQ ID NO: 9874 - DNA, 23 bp, Homo sapiens
  source 1..23: mol_type = genomic DNA
atgaagatggaggaagattgtgg

SEQ ID NO: 9875 - DNA, 23 bp, Homo sapiens
  source 1..23: mol_type = genomic DNA
aaatgtgtaaactttgagagtgg

SEQ ID NO: 9876 - DNA, 23 bp, Homo sapiens
  source 1..23: mol_type = genomic DNA
agataatcaagtgttgccatggg

SEQ ID NO: 9877 - DNA, 23 bp, Homo sapiens
  source 1..23: mol_type = genomic DNA
actttgcactaagtgagcctggg

SEQ ID NO: 9878 - DNA, 23 bp, Homo sapiens
  source 1..23: mol_type = genomic DNA
ttatgacagcccccataaagggg

SEQ ID NO: 9879 - DNA, 23 bp, Homo sapiens
  source 1..23: mol_type = genomic DNA
tgtcagaagagcctcctgatggg

SEQ ID NO: 9880 - DNA, 23 bp, Homo sapiens
  source 1..23: mol_type = genomic DNA
ttacttcatacttctgctggagg

SEQ ID NO: 9881 - DNA, 23 bp, Homo sapiens
  source 1..23: mol_type = genomic DNA
ccaagtcatcatccaatgcatgg

SEQ ID NO: 9882 - DNA, 23 bp, Homo sapiens
  source 1..23: mol_type = genomic DNA
aatgaataatttatccctggtgg

SEQ ID NO: 9883 - DNA, 23 bp, Homo sapiens
  source 1..23: mol_type = genomic DNA
atataatgtggttaagaccatgg

SEQ ID NO: 9884 - DNA, 23 bp, Homo sapiens
  source 1..23: mol_type = genomic DNA
ttaggtattatgtaaatcagtgg

SEQ ID NO: 9885 - DNA, 23 bp, Homo sapiens
  source 1..23: mol_type = genomic DNA
gacattttactatacagcccagg

SEQ ID NO: 9886 - DNA, 23 bp, Homo sapiens
  source 1..23: mol_type = genomic DNA
aagacttttggagctcaccatgg

SEQ ID NO: 9887 - DNA, 23 bp, Homo sapiens
  source 1..23: mol_type = genomic DNA
actagatccttttggaacccggg

SEQ ID NO: 9888 - DNA, 23 bp, Homo sapiens
  source 1..23: mol_type = genomic DNA
tttacaagttttaatttcagggg

SEQ ID NO: 9889 - DNA, 23 bp, Homo sapiens
  source 1..23: mol_type = genomic DNA
agggaggcctggacaccagttgg

SEQ ID NO: 9890 - DNA, 23 bp, Homo sapiens
  source 1..23: mol_type = genomic DNA
ctgcatcctaactacataggagg

SEQ ID NO: 9891 - DNA, 23 bp, Homo sapiens
  source 1..23: mol_type = genomic DNA
gcagttgctggatgcacaagcgg

SEQ ID NO: 9892 - DNA, 23 bp, Homo sapiens
  source 1..23: mol_type = genomic DNA
agaaagtgagaaatggcataggg

SEQ ID NO: 9893 - DNA, 23 bp, Homo sapiens
  source 1..23: mol_type = genomic DNA
tgaattctagagaatgctatggg

SEQ ID NO: 9894 - DNA, 23 bp, Homo sapiens
  source 1..23: mol_type = genomic DNA
tcgttcgtaattaaatacccagg

SEQ ID NO: 9895 - DNA, 23 bp, Homo sapiens
  source 1..23: mol_type = genomic DNA
acatgaaatgacggaaatgatgg

SEQ ID NO: 9896 - DNA, 23 bp, Homo sapiens
  source 1..23: mol_type = genomic DNA
ccaaggagtgtgaaaacacgtgg

SEQ ID NO: 9897 - DNA, 23 bp, Homo sapiens
  source 1..23: mol_type = genomic DNA
ggacaaaaagagttttagcaagg

SEQ ID NO: 9898 - DNA, 23 bp, Homo sapiens
  source 1..23: mol_type = genomic DNA
catgtggaaacaagcagagaggg

SEQ ID NO: 9899 - DNA, 23 bp, Homo sapiens
  source 1..23: mol_type = genomic DNA
ttaattgataattgtctacaggg

SEQ ID NO: 9900 - DNA, 23 bp, Homo sapiens
  source 1..23: mol_type = genomic DNA
agctacagtgtacctcagacagg

SEQ ID NO: 9901 - DNA, 23 bp, Homo sapiens
  source 1..23: mol_type = genomic DNA
gagaaagtgagaaatggcatagg

SEQ ID NO: 9902 - DNA, 23 bp, Homo sapiens
  source 1..23: mol_type = genomic DNA
gtggagataaccaatatacttgg

SEQ ID NO: 9903 - DNA, 23 bp, Homo sapiens
  source 1..23: mol_type = genomic DNA
agacatttaatgcaaaactaggg

SEQ ID NO: 9904 - DNA, 23 bp, Homo sapiens
  source 1..23: mol_type = genomic DNA
gcctaaatgagaagtcccattgg

SEQ ID NO: 9905 - DNA, 23 bp, Homo sapiens
  source 1..23: mol_type = genomic DNA
tctctctcaaaaatatgcaatgg

SEQ ID NO: 9906 - DNA, 23 bp, Homo sapiens
  source 1..23: mol_type = genomic DNA
actgcaatcaacgattctatggg

SEQ ID NO: 9907 - DNA, 23 bp, Homo sapiens
  source 1..23: mol_type = genomic DNA
ataggctttttattataactggg

SEQ ID NO: 9908 - DNA, 23 bp, Homo sapiens
  source 1..23: mol_type = genomic DNA
agagccctgggaccctgcaatgg

SEQ ID NO: 9909 - DNA, 23 bp, Homo sapiens
  source 1..23: mol_type = genomic DNA
aatgccatctgcaaagcactggg

SEQ ID NO: 9910 - DNA, 23 bp, Homo sapiens
  source 1..23: mol_type = genomic DNA
gctattacagataacatacaagg

SEQ ID NO: 9911 - DNA, 23 bp, Homo sapiens
  source 1..23: mol_type = genomic DNA
acaagtcaggtaaagagtcgtgg

SEQ ID NO: 9912 - DNA, 23 bp, Homo sapiens
  source 1..23: mol_type = genomic DNA
ggtttcatagactgggaaggggg

SEQ ID NO: 9913 - DNA, 23 bp, Homo sapiens
  source 1..23: mol_type = genomic DNA
gtctgtgaagattttaagggagg

SEQ ID NO: 9914 - DNA, 23 bp, Homo sapiens
  source 1..23: mol_type = genomic DNA
aatggtttagacacagaactggg

SEQ ID NO: 9915 - DNA, 23 bp, Homo sapiens
  source 1..23: mol_type = genomic DNA
atatcaacacgaaagaagacagg

SEQ ID NO: 9916 - DNA, 23 bp, Homo sapiens
  source 1..23: mol_type = genomic DNA
tataattcactggtttgggtagg

SEQ ID NO: 9917 - DNA, 23 bp, Homo sapiens
  source 1..23: mol_type = genomic DNA
accgtcaagtttctgacccatgg

SEQ ID NO: 9918 - DNA, 23 bp, Homo sapiens
  source 1..23: mol_type = genomic DNA
ctgaacctaaaactaagcgttgg

SEQ ID NO: 9919 - DNA, 23 bp, Homo sapiens
  source 1..23: mol_type = genomic DNA
atttaataccaaattaaggtagg

SEQ ID NO: 9920 - DNA, 23 bp, Homo sapiens
  source 1..23: mol_type = genomic DNA
gcttgcagatagagagacacagg

SEQ ID NO: 9921 - DNA, 23 bp, Homo sapiens
  source 1..23: mol_type = genomic DNA
gtttggagaatggattgtgttgg

SEQ ID NO: 9922 - DNA, 23 bp, Homo sapiens
  source 1..23: mol_type = genomic DNA
atatttggtatatatgccccagg

SEQ ID NO: 9923 - DNA, 23 bp, Homo sapiens
  source 1..23: mol_type = genomic DNA
ccgttgaagtaattaagcatagg

SEQ ID NO: 9924 - DNA, 23 bp, Homo sapiens
  source 1..23: mol_type = genomic DNA
tttttgttttcaggaaagagtgg

SEQ ID NO: 9925 - DNA, 23 bp, Homo sapiens
  source 1..23: mol_type = genomic DNA
ttttaaacatttatatacacagg

SEQ ID NO: 9926 - DNA, 23 bp, Homo sapiens
  source 1..23: mol_type = genomic DNA
atgtcagaagagcctcctgatgg

SEQ ID NO: 9927 - DNA, 23 bp, Homo sapiens
  source 1..23: mol_type = genomic DNA
catgaagacatttaaatcagagg

SEQ ID NO: 9928 - DNA, 23 bp, Homo sapiens
  source 1..23: mol_type = genomic DNA
atattcagtgaaatattagtggg

SEQ ID NO: 9929 - DNA, 23 bp, Homo sapiens
  source 1..23: mol_type = genomic DNA
agagatataaaaatgatgccagg

SEQ ID NO: 9930 - DNA, 23 bp, Homo sapiens
  source 1..23: mol_type = genomic DNA
agaataatactgaatgccatagg

SEQ ID NO: 9931 - DNA, 23 bp, Homo sapiens
  source 1..23: mol_type = genomic DNA
aattgaagacaagctctgaaagg

SEQ ID NO: 9932 - DNA, 23 bp, Homo sapiens
  source 1..23: mol_type = genomic DNA
ttatgtgagttgttaaagtgggg

SEQ ID NO: 9933 - DNA, 23 bp, Homo sapiens
  source 1..23: mol_type = genomic DNA
tctctccaatattctgccagtgg

SEQ ID NO: 9934 - DNA, 23 bp, Homo sapiens
  source 1..23: mol_type = genomic DNA
tcagtggtttacacagcacctgg

SEQ ID NO: 9935 - DNA, 23 bp, Homo sapiens
  source 1..23: mol_type = genomic DNA
aaaatattttgacgtctggtagg

SEQ ID NO: 9936 - DNA, 23 bp, Homo sapiens
  source 1..23: mol_type = genomic DNA
atatacttggcagagcctctagg

SEQ ID NO: 9937 - DNA, 23 bp, Homo sapiens
  source 1..23: mol_type = genomic DNA
ctttatgccagcaatgaggatgg

SEQ ID NO: 9938 - DNA, 23 bp, Homo sapiens
  source 1..23: mol_type = genomic DNA
tttctgcagtgaattggaggtgg

SEQ ID NO: 9939 - DNA, 23 bp, Homo sapiens
  source 1..23: mol_type = genomic DNA
aacttgaaattaagagactaggg

SEQ ID NO: 9940 - DNA, 23 bp, Homo sapiens
  source 1..23: mol_type = genomic DNA
ttagccaagctgacacaaccagg

SEQ ID NO: 9941 - DNA, 23 bp, Homo sapiens
  source 1..23: mol_type = genomic DNA
gactggataattaaagagtaggg

SEQ ID NO: 9942 - DNA, 23 bp, Homo sapiens
  source 1..23: mol_type = genomic DNA
atatgctgcttaaaaacatacgg

SEQ ID NO: 9943 - DNA, 23 bp, Homo sapiens
  source 1..23: mol_type = genomic DNA
ttaaccattgcagggtcccaggg

SEQ ID NO: 9944 - DNA, 23 bp, Homo sapiens
  source 1..23: mol_type = genomic DNA
ttcaatgccatattcaacgttgg

SEQ ID NO: 9945 - DNA, 23 bp, Homo sapiens
  source 1..23: mol_type = genomic DNA
gttggagaaagatttctactagg

SEQ ID NO: 9946 - DNA, 23 bp, Homo sapiens
  source 1..23: mol_type = genomic DNA
gatatctttgctgagatgcatgg

SEQ ID NO: 9947 - DNA, 23 bp, Homo sapiens
  source 1..23: mol_type = genomic DNA
ggaaagtaagttaagcactaagg

SEQ ID NO: 9948 - DNA, 23 bp, Homo sapiens
  source 1..23: mol_type = genomic DNA
ggactgattccaaaggtgtaggg

SEQ ID NO: 9949 - DNA, 23 bp, Homo sapiens
  source 1..23: mol_type = genomic DNA
ttaaagagtagggaagcattggg

SEQ ID NO: 9950 - DNA, 23 bp, Homo sapiens
  source 1..23: mol_type = genomic DNA
tgtctccctctgtggaagggggg

SEQ ID NO: 9951 - DNA, 23 bp, Homo sapiens
  source 1..23: mol_type = genomic DNA
cctaaatgagaagtcccattggg

SEQ ID NO: 9952 - DNA, 23 bp, Homo sapiens
  source 1..23: mol_type = genomic DNA
gattgagttgttatttatcgagg

SEQ ID NO: 9953 - DNA, 23 bp, Homo sapiens
  source 1..23: mol_type = genomic DNA
agtaggtatggttaattggaagg

SEQ ID NO: 9954 - DNA, 23 bp, Homo sapiens
  source 1..23: mol_type = genomic DNA
gagggacaagttttcccagaagg

SEQ ID NO: 9955 - DNA, 23 bp, Homo sapiens
  source 1..23: mol_type = genomic DNA
ttacaataactggaatgaaaggg

SEQ ID NO: 9956 - DNA, 23 bp, Homo sapiens
  source 1..23: mol_type = genomic DNA
caatggttaacgtatttcacagg

SEQ ID NO: 9957 - DNA, 23 bp, Homo sapiens
  source 1..23: mol_type = genomic DNA
gaaaggggaagagtagagagagg

SEQ ID NO: 9958 - DNA, 23 bp, Homo sapiens
  source 1..23: mol_type = genomic DNA
aatagatctagttttaccctagg

SEQ ID NO: 9959 - DNA, 23 bp, Homo sapiens
  source 1..23: mol_type = genomic DNA
ctgtttggagaactgttggaggg

SEQ ID NO: 9960 - DNA, 23 bp, Homo sapiens
  source 1..23: mol_type = genomic DNA
tgtagagtatgagagggtaaagg

SEQ ID NO: 9961 - DNA, 23 bp, Homo sapiens
  source 1..23: mol_type = genomic DNA
gaacaattccaggaagagctagg

SEQ ID NO: 9962 - DNA, 23 bp, Homo sapiens
  source 1..23: mol_type = genomic DNA
aactgcatgacccagaggatggg

SEQ ID NO: 9963 - DNA, 23 bp, Homo sapiens
  source 1..23: mol_type = genomic DNA
accatgggtcagaaacttgacgg

SEQ ID NO: 9964 - DNA, 23 bp, Homo sapiens
  source 1..23: mol_type = genomic DNA
cctatgcttaattacttcaacgg

SEQ ID NO: 9965 - DNA, 23 bp, Homo sapiens
  source 1..23: mol_type = genomic DNA
gatccttttggaacccgggttgg

SEQ ID NO: 9966 - DNA, 23 bp, Homo sapiens
  source 1..23: mol_type = genomic DNA
atacataagttcattagcaatgg

SEQ ID NO: 9967 - DNA, 23 bp, Homo sapiens
  source 1..23: mol_type = genomic DNA
agtaaatcaattagaaaggaggg

SEQ ID NO: 9968 - DNA, 23 bp, Homo sapiens
  source 1..23: mol_type = genomic DNA
atcttccccccttccacagaggg

SEQ ID NO: 9969 - DNA, 23 bp, Homo sapiens
  source 1..23: mol_type = genomic DNA
caaaacctctttaattagagagg

SEQ ID NO: 9970 - DNA, 23 bp, Homo sapiens
  source 1..23: mol_type = genomic DNA
gaaagaatcaggagtccgtaagg

SEQ ID NO: 9971 - DNA, 23 bp, Homo sapiens
  source 1..23: mol_type = genomic DNA
aggaaatcagagatgtttgaagg

SEQ ID NO: 9972 - DNA, 23 bp, Homo sapiens
  source 1..23: mol_type = genomic DNA
gagatagtctaaatcaaatgagg

SEQ ID NO: 9973 - DNA, 23 bp, Homo sapiens
  source 1..23: mol_type = genomic DNA
tctatgaaaccaaggtaagatgg

SEQ ID NO: 9974 - DNA, 23 bp, Homo sapiens
  source 1..23: mol_type = genomic DNA
gtatgcgaacaaaacttacatgg

SEQ ID NO: 9975 - DNA, 23 bp, Homo sapiens
  source 1..23: mol_type = genomic DNA
gcttttatctgcaaatgaagtgg

SEQ ID NO: 9976 - DNA, 23 bp, Homo sapiens
  source 1..23: mol_type = genomic DNA
attcttagtaaagtcttccctgg

SEQ ID NO: 9977 - DNA, 23 bp, Homo sapiens
  source 1..23: mol_type = genomic DNA
attacagaatattattaaagggg

SEQ ID NO: 9978 - DNA, 23 bp, Homo sapiens
  source 1..23: mol_type = genomic DNA
ggattttattccattggaggagg

SEQ ID NO: 9979 - DNA, 23 bp, Homo sapiens
  source 1..23: mol_type = genomic DNA
ttaatactaatagaggtgtcagg

SEQ ID NO: 9980 - DNA, 23 bp, Homo sapiens
  source 1..23: mol_type = genomic DNA
atctttctgtatgtgcccaatgg

SEQ ID NO: 9981 - DNA, 23 bp, Homo sapiens
  source 1..23: mol_type = genomic DNA
gttgggctctaagtctctacagg

SEQ ID NO: 9982 - DNA, 23 bp, Homo sapiens
  source 1..23: mol_type = genomic DNA
attgaagacaagctctgaaaggg

SEQ ID NO: 9983 - DNA, 23 bp, Homo sapiens
  source 1..23: mol_type = genomic DNA
ccataaataataacaaattgagg

SEQ ID NO: 9984 - DNA, 23 bp, Homo sapiens
  source 1..23: mol_type = genomic DNA
acacgtgagaaagtgagaaatgg

SEQ ID NO: 9985 - DNA, 23 bp, Homo sapiens
  source 1..23: mol_type = genomic DNA
agcactaaggaatatattagtgg

SEQ ID NO: 9986 - DNA, 23 bp, Homo sapiens
  source 1..23: mol_type = genomic DNA
gtactctccctgagtgccaatgg

SEQ ID NO: 9987 - DNA, 23 bp, Homo sapiens
  source 1..23: mol_type = genomic DNA
tggttatctccacacaaagaagg

SEQ ID NO: 9988 - DNA, 23 bp, Homo sapiens
  source 1..23: mol_type = genomic DNA
agagaagtcaacatgcttgtggg

SEQ ID NO: 9989 - DNA, 23 bp, Homo sapiens
  source 1..23: mol_type = genomic DNA
gcacagaagtgtgtttcaaaggg

SEQ ID NO: 9990 - DNA, 23 bp, Homo sapiens
  source 1..23: mol_type = genomic DNA
ggagtcagtcacttagagccagg

SEQ ID NO: 9991 - DNA, 23 bp, Homo sapiens
  source 1..23: mol_type = genomic DNA
ccttttatacaaagatcgtatgg

SEQ ID NO: 9992 - DNA, 23 bp, Homo sapiens
  source 1..23: mol_type = genomic DNA
ttctgtctgcttaccctggaggg

SEQ ID NO: 9993 - DNA, 23 bp, Homo sapiens
  source 1..23: mol_type = genomic DNA
tgaaagggaagaactccaacagg

SEQ ID NO: 9994 - DNA, 23 bp, Homo sapiens
  source 1..23: mol_type = genomic DNA
tatgtgtgcaatgtataagtagg

SEQ ID NO: 9995 - DNA, 23 bp, Homo sapiens
  source 1..23: mol_type = genomic DNA
cgttgaagtaattaagcataggg

SEQ ID NO: 9996 - DNA, 23 bp, Homo sapiens
  source 1..23: mol_type = genomic DNA
ctgtggacatattttctcaaggg

SEQ ID NO: 9997 - DNA, 23 bp, Homo sapiens
  source 1..23: mol_type = genomic DNA
ttggtttcatagactgggaaggg

SEQ ID NO: 9998 - DNA, 23 bp, Homo sapiens
  source 1..23: mol_type = genomic DNA
tagcaaccaggcagaatgaatgg

SEQ ID NO: 9999 - DNA, 23 bp, Homo sapiens
  source 1..23: mol_type = genomic DNA
cttccaacccgggttccaaaagg

SEQ ID NO: 10000 - DNA, 23 bp, Homo sapiens
  source 1..23: mol_type = genomic DNA
attaaaatgtcttctcacttcgg

SEQ ID NO: 10001 - DNA, 23 bp, Homo sapiens
  source 1..23: mol_type = genomic DNA
tatcagaactacgtgccaactgg

SEQ ID NO: 10002 - DNA, 23 bp, Homo sapiens
  source 1..23: mol_type = genomic DNA
aagagatctttggagccaccagg

SEQ ID NO: 10003 - DNA, 23 bp, Homo sapiens
  source 1..23: mol_type = genomic DNA
ggatagagtctgataacattcgg

SEQ ID NO: 10004 - DNA, 23 bp, Homo sapiens
  source 1..23: mol_type = genomic DNA
tgatggagtgaaaagcataatgg

SEQ ID NO: 10005 - DNA, 23 bp, Homo sapiens
  source 1..23: mol_type = genomic DNA
agtgcagcttccatagactttgg

SEQ ID NO: 10006 - DNA, 23 bp, Homo sapiens
  source 1..23: mol_type = genomic DNA
aagtttaaattgcctcccacagg

SEQ ID NO: 10007 - DNA, 23 bp, Homo sapiens
  source 1..23: mol_type = genomic DNA
agaagggagtgaagctggagagg

SEQ ID NO: 10008 - DNA, 23 bp, Homo sapiens
  source 1..23: mol_type = genomic DNA
tggaaactcaactttctcctggg

SEQ ID NO: 10009 - DNA, 23 bp, Homo sapiens
  source 1..23: mol_type = genomic DNA
tttatttatcataaggacatagg

SEQ ID NO: 10010 - DNA, 23 bp, Homo sapiens
  source 1..23: mol_type = genomic DNA
ccagcagaagtatgaagtaaagg

SEQ ID NO: 10011 - DNA, 23 bp, Homo sapiens
  source 1..23: mol_type = genomic DNA
aggaattagttataaagccaagg

SEQ ID NO: 10012 - DNA, 23 bp, Homo sapiens
  source 1..23: mol_type = genomic DNA
gaactatctgtattcccttacgg

SEQ ID NO: 10013 - DNA, 23 bp, Homo sapiens
  source 1..23: mol_type = genomic DNA
gtgtgtctccctctgtggaaggg

SEQ ID NO: 10014 - DNA, 23 bp, Homo sapiens
  source 1..23: mol_type = genomic DNA
tcttcatgacagtttatgctggg

SEQ ID NO: 10015 - DNA, 23 bp, Homo sapiens
  source 1..23: mol_type = genomic DNA
ggaaattaagggaaattccaagg

SEQ ID NO: 10016 - DNA, 23 bp, Homo sapiens
  source 1..23: mol_type = genomic DNA
tgaggcacgtttgagtttcaggg

SEQ ID NO: 10017 - DNA, 23 bp, Homo sapiens
  source 1..23: mol_type = genomic DNA
aaagagtcgtgggtgacaactgg

SEQ ID NO: 10018 - DNA, 23 bp, Homo sapiens
  source 1..23: mol_type = genomic DNA
ctagtctcttaatttcaagttgg

SEQ ID NO: 10019 - DNA, 23 bp, Homo sapiens
  source 1..23: mol_type = genomic DNA
acacaatccattctccaaacagg

SEQ ID NO: 10020 - DNA, 23 bp, Homo sapiens
  source 1..23: mol_type = genomic DNA
gtaaataaggataccctaatggg

SEQ ID NO: 10021 - DNA, 23 bp, Homo sapiens
  source 1..23: mol_type = genomic DNA
agtttccaattattaattcaggg

SEQ ID NO: 10022 - DNA, 23 bp, Homo sapiens
  source 1..23: mol_type = genomic DNA
cagtggatatattaaaatgatgg

SEQ ID NO: 10023 - DNA, 23 bp, Homo sapiens
  source 1..23: mol_type = genomic DNA
attaggtccttcaaataacttgg

SEQ ID NO: 10024 - DNA, 23 bp, Homo sapiens
  source 1..23: mol_type = genomic DNA
acttacctctctaattaaagagg

SEQ ID NO: 10025 - DNA, 23 bp, Homo sapiens
  source 1..23: mol_type = genomic DNA
cctctctgcttgtttccacatgg

SEQ ID NO: 10026 - DNA, 23 bp, Homo sapiens
  source 1..23: mol_type = genomic DNA
ctgcagtgaattggaggtggtgg

SEQ ID NO: 10027 - DNA, 23 bp, Homo sapiens
  source 1..23: mol_type = genomic DNA
tggtagtgtgtcacagaagctgg

SEQ ID NO: 10028 - DNA, 23 bp, Homo sapiens
  source 1..23: mol_type = genomic DNA
gaaggtagacataaaattagtgg

SEQ ID NO: 10029 - DNA, 23 bp, Homo sapiens
  source 1..23: mol_type = genomic DNA
aagtacacgtcagattgaaatgg

SEQ ID NO: 10030 - DNA, 23 bp, Homo sapiens
  source 1..23: mol_type = genomic DNA
tggtctgttttttccctccaggg

SEQ ID NO: 10031 - DNA, 23 bp, Homo sapiens
  source 1..23: mol_type = genomic DNA
gcttcagatgatacaaaaacggg

SEQ ID NO: 10032 - DNA, 23 bp, Homo sapiens
  source 1..23: mol_type = genomic DNA
ataattccaaagtaaatcactgg

SEQ ID NO: 10033 - DNA, 23 bp, Homo sapiens
  source 1..23: mol_type = genomic DNA
atcattcaatttgtatgcaaggg

SEQ ID NO: 10034 - DNA, 23 bp, Homo sapiens
  source 1..23: mol_type = genomic DNA
ttttgatctcacttgagagttgg

SEQ ID NO: 10035 - DNA, 23 bp, Homo sapiens
  source 1..23: mol_type = genomic DNA
tattcttgttcctcctccaatgg

SEQ ID NO: 10036 - DNA, 23 bp, Homo sapiens
  source 1..23: mol_type = genomic DNA
gctgctattaatactaatagagg

SEQ ID NO: 10037 - DNA, 23 bp, Homo sapiens
  source 1..23: mol_type = genomic DNA
ataggcttcctttgttttgacgg

SEQ ID NO: 10038 - DNA, 23 bp, Homo sapiens
  source 1..23: mol_type = genomic DNA
ttgtatgtttccttttaaaacgg

SEQ ID NO: 10039 - DNA, 23 bp, Homo sapiens
  source 1..23: mol_type = genomic DNA
ctgactcataaatatgagatagg

SEQ ID NO: 10040 - DNA, 23 bp, Homo sapiens
  source 1..23: mol_type = genomic DNA
tttggactcttctcacctgttgg

SEQ ID NO: 10041 - DNA, 23 bp, Homo sapiens
  source 1..23: mol_type = genomic DNA
gataaagtaaaagccacaattgg

SEQ ID NO: 10042 - DNA, 23 bp, Homo sapiens
  source 1..23: mol_type = genomic DNA
ttttcagcatcaaaaataagtgg

SEQ ID NO: 10043 - DNA, 23 bp, Homo sapiens
  source 1..23: mol_type = genomic DNA
ataatgtgtccctacacctttgg

SEQ ID NO: 10044 - DNA, 23 bp, Homo sapiens
  source 1..23: mol_type = genomic DNA
catacgatctttgtataaaaggg

SEQ ID NO: 10045 - DNA, 23 bp, Homo sapiens
  source 1..23: mol_type = genomic DNA
ttaacctgcccaggaatagatgg

SEQ ID NO: 10046 - DNA, 23 bp, Homo sapiens
  source 1..23: mol_type = genomic DNA
tgtttatagacaacgcttagtgg

SEQ ID NO: 10047 - DNA, 23 bp, Homo sapiens
  source 1..23: mol_type = genomic DNA
actaaaatctgaaagttgtatgg

SEQ ID NO: 10048 - DNA, 23 bp, Homo sapiens
  source 1..23: mol_type = genomic DNA
aacatactaagtatataattcgg

SEQ ID NO: 10049 - DNA, 23 bp, Homo sapiens
  source 1..23: mol_type = genomic DNA
aaaggcccagtgatttactttgg

SEQ ID NO: 10050 - DNA, 23 bp, Homo sapiens
  source 1..23: mol_type = genomic DNA
tattttttgctgtcttaggttgg

SEQ ID NO: 10051 - DNA, 23 bp, Homo sapiens
  source 1..23: mol_type = genomic DNA
ctttcaggtttctaaggatgagg

SEQ ID NO: 10052 - DNA, 23 bp, Homo sapiens
  source 1..23: mol_type = genomic DNA
tccttctgccttattcctatggg

SEQ ID NO: 10053 - DNA, 23 bp, Homo sapiens
  source 1..23: mol_type = genomic DNA
actgaacgaagatagcaaaaagg

SEQ ID NO: 10054 - DNA, 23 bp, Homo sapiens
  source 1..23: mol_type = genomic DNA
tctattcctgggcaggttaaggg

SEQ ID NO: 10055 - DNA, 23 bp, Homo sapiens
  source 1..23: mol_type = genomic DNA
gctaaaggagattttaagctagg

SEQ ID NO: 10056 - DNA, 23 bp, Homo sapiens
  source 1..23: mol_type = genomic DNA
aagatatacttgaagaatagagg

SEQ ID NO: 10057 - DNA, 23 bp, Homo sapiens
  source 1..23: mol_type = genomic DNA
gcttgaattgtgtaagaattggg

SEQ ID NO: 10058 - DNA, 23 bp, Homo sapiens
  source 1..23: mol_type = genomic DNA
gagaggcatggaagacttatggg

SEQ ID NO: 10059 - DNA, 23 bp, Homo sapiens
  source 1..23: mol_type = genomic DNA
gcagcactattttccctgttagg

SEQ ID NO: 10060 - DNA, 23 bp, Homo sapiens
  source 1..23: mol_type = genomic DNA
agaggctctgccaagtatattgg

SEQ ID NO: 10061 - DNA, 23 bp, Homo sapiens
  source 1..23: mol_type = genomic DNA
gcatgtagacttaaaccttctgg

SEQ ID NO: 10062 - DNA, 23 bp, Homo sapiens
  source 1..23: mol_type = genomic DNA
tctgtctgtgaagattttaaggg

SEQ ID NO: 10063 - DNA, 23 bp, Homo sapiens
  source 1..23: mol_type = genomic DNA
tacacagtacagtaatttagtgg

SEQ ID NO: 10064 - DNA, 23 bp, Homo sapiens
  source 1..23: mol_type = genomic DNA
atttttatgggaaattcaactgg

SEQ ID NO: 10065 - DNA, 23 bp, Homo sapiens
  source 1..23: mol_type = genomic DNA
tcatgtagcagttattttaaggg

SEQ ID NO: 10066 - DNA, 23 bp, Homo sapiens
  source 1..23: mol_type = genomic DNA
gagaaaatatgtccacagtttgg

SEQ ID NO: 10067 - DNA, 23 bp, Homo sapiens
  source 1..23: mol_type = genomic DNA
ttaatcatttcaaaattcattgg

SEQ ID NO: 10068 - DNA, 23 bp, Homo sapiens
  source 1..23: mol_type = genomic DNA
gtgatactcccataggaataagg

SEQ ID NO: 10069 - DNA, 23 bp, Homo sapiens
  source 1..23: mol_type = genomic DNA
tgaggattttaggaaattaaggg

SEQ ID NO: 10070 - DNA, 23 bp, Homo sapiens
  source 1..23: mol_type = genomic DNA
ccacgtgttttcacactccttgg

SEQ ID NO: 10071 - DNA, 23 bp, Homo sapiens
  source 1..23: mol_type = genomic DNA
cttatgacagcccccataaaggg

SEQ ID NO: 10072 - DNA, 23 bp, Homo sapiens
  source 1..23: mol_type = genomic DNA
ttaaaatgttcattaagaattgg

SEQ ID NO: 10073 - DNA, 23 bp, Homo sapiens
  source 1..23: mol_type = genomic DNA
ggatggatcccatctattatagg

SEQ ID NO: 10074 - DNA, 23 bp, Homo sapiens
  source 1..23: mol_type = genomic DNA
acgaatgtaatgtaatttactgg

SEQ ID NO: 10075 - DNA, 23 bp, Homo sapiens
  source 1..23: mol_type = genomic DNA
agaagtacacctataatagatgg

SEQ ID NO: 10076 - DNA, 23 bp, Homo sapiens
  source 1..23: mol_type = genomic DNA
tatttacccaaaacaattaaggg

SEQ ID NO: 10077 - DNA, 23 bp, Homo sapiens
  source 1..23: mol_type = genomic DNA
ttgtatactttgtaccctaatgg

SEQ ID NO: 10078 - DNA, 23 bp, Homo sapiens
  source 1..23: mol_type = genomic DNA
ggtaaataaggataccctaatgg

SEQ ID NO: 10079 - DNA, 23 bp, Homo sapiens
  source 1..23: mol_type = genomic DNA
acataaagaagtgtaataatagg

SEQ ID NO: 10080 - DNA, 23 bp, Homo sapiens
  source 1..23: mol_type = genomic DNA
atttatcctcctatgtagttagg

SEQ ID NO: 10081 - DNA, 23 bp, Homo sapiens
  source 1..23: mol_type = genomic DNA
aattacagaatattattaaaggg

SEQ ID NO: 10082 - DNA, 23 bp, Homo sapiens
  source 1..23: mol_type = genomic DNA
tattttatgttgcttccatttgg

SEQ ID NO: 10083 - DNA, 23 bp, Homo sapiens
  source 1..23: mol_type = genomic DNA
gattgctcacttctacttagagg

SEQ ID NO: 10084 - DNA, 23 bp, Homo sapiens
  source 1..23: mol_type = genomic DNA
gctatccactggcagaatattgg

SEQ ID NO: 10085 - DNA, 23 bp, Homo sapiens
  source 1..23: mol_type = genomic DNA
tttgagaccatgcaaatataagg

SEQ ID NO: 10086 - DNA, 23 bp, Homo sapiens
  source 1..23: mol_type = genomic DNA
tgagagagagaaatatgatatgg

SEQ ID NO: 10087 - DNA, 23 bp, Homo sapiens
  source 1..23: mol_type = genomic DNA
cttttgtgtgtacctcaaaatgg

SEQ ID NO: 10088 - DNA, 23 bp, Homo sapiens
  source 1..23: mol_type = genomic DNA
ccttaaatactctcctactatgg

SEQ ID NO: 10089 - DNA, 23 bp, Homo sapiens
  source 1..23: mol_type = genomic DNA
gtaatgacacttttgcctattgg

SEQ ID NO: 10090 - DNA, 23 bp, Homo sapiens
  source 1..23: mol_type = genomic DNA
gatataaagctttaatttgaggg

SEQ ID NO: 10091 - DNA, 23 bp, Homo sapiens
  source 1..23: mol_type = genomic DNA
ccttaaattgggtacttaaaggg

SEQ ID NO: 10092 - DNA, 23 bp, Homo sapiens
  source 1..23: mol_type = genomic DNA
tatctttctggtattttcttggg

SEQ ID NO: 10093 - DNA, 23 bp, Homo sapiens
  source 1..23: mol_type = genomic DNA
ttacttcaacggatattctatgg

SEQ ID NO: 10094 - DNA, 23 bp, Homo sapiens
  source 1..23: mol_type = genomic DNA
ttatctgcataacgaaaatatgg

SEQ ID NO: 10095 - DNA, 23 bp, Homo sapiens
  source 1..23: mol_type = genomic DNA
catagtttcttaactatctaagg

SEQ ID NO: 10096 - DNA, 23 bp, Homo sapiens
  source 1..23: mol_type = genomic DNA
agacatttgaccgttttaaaagg

SEQ ID NO: 10097 - DNA, 23 bp, Homo sapiens
  source 1..23: mol_type = genomic DNA
ttaaatcccttaattgttttggg

SEQ ID NO: 10098 - DNA, 23 bp, Homo sapiens
  source 1..23: mol_type = genomic DNA
accatccctgaattaataattgg

SEQ ID NO: 10099 - DNA, 23 bp, Homo sapiens
  source 1..23: mol_type = genomic DNA
gataccctaatgggtaaaattgg

SEQ ID NO: 10100 - DNA, 23 bp, Homo sapiens
  source 1..23: mol_type = genomic DNA
gctatgttgtaataagttaaagg

SEQ ID NO: 10101 - DNA, 23 bp, Homo sapiens
  source 1..23: mol_type = genomic DNA
aatgtcttcatgctttaaattgg

SEQ ID NO: 10102 - DNA, 23 bp, Homo sapiens
  source 1..23: mol_type = genomic DNA
gctctgttaatttctgtattagg

SEQ ID NO: 10103 - DNA, 23 bp, Homo sapiens
  source 1..23: mol_type = genomic DNA
attctcgtctctgttctttatgg

SEQ ID NO: 10104 - DNA, 23 bp, Homo sapiens
  source 1..23: mol_type = genomic DNA
ataatcttcctaccttaatttgg

SEQ ID NO: 10105 - DNA, 23 bp, Homo sapiens
  source 1..23: mol_type = genomic DNA
agcctgccgagtgagagtgtggg

SEQ ID NO: 10106 - DNA, 23 bp, Homo sapiens
  source 1..23: mol_type = genomic DNA
tacagctgaatggaaccaggtgg

SEQ ID NO: 10107 - DNA, 23 bp, Homo sapiens
  source 1..23: mol_type = genomic DNA
actggcttgatgatttccagcgg

SEQ ID NO: 10108 - DNA, 23 bp, Homo sapiens
  source 1..23: mol_type = genomic DNA
ttagaataactggaacaatgtgg

SEQ ID NO: 10109 - DNA, 23 bp, Homo sapiens
  source 1..23: mol_type = genomic DNA
gaaaatctggagcttctgtgagg

SEQ ID NO: 10110 - DNA, 23 bp, Homo sapiens
  source 1..23: mol_type = genomic DNA
agggccaacaagatatcacaagg

SEQ ID NO: 10111 - DNA, 23 bp, Homo sapiens
  source 1..23: mol_type = genomic DNA
gttatcttctcctatcagagggg

SEQ ID NO: 10112 - DNA, 23 bp, Homo sapiens
  source 1..23: mol_type = genomic DNA
taaatatcaagaaagacaggagg

SEQ ID NO: 10113 - DNA, 23 bp, Homo sapiens
  source 1..23: mol_type = genomic DNA
tgactatgtattaagccacctgg

SEQ ID NO: 10114 - DNA, 23 bp, Homo sapiens
  source 1..23: mol_type = genomic DNA
aatactggagtacagatgggagg

SEQ ID NO: 10115 - DNA, 23 bp, Homo sapiens
  source 1..23: mol_type = genomic DNA
gaagcaaagaatacaacacaggg

SEQ ID NO: 10116 - DNA, 23 bp, Homo sapiens
  source 1..23: mol_type = genomic DNA
attactaataagtatataggcgg

SEQ ID NO: 10117 - DNA, 23 bp, Homo sapiens
  source 1..23: mol_type = genomic DNA
tgaacatggcaatttcgaggagg

SEQ ID NO: 10118 - DNA, 23 bp, Homo sapiens
  source 1..23: mol_type = genomic DNA
tactttgcaagatagacctgtgg

SEQ ID NO: 10119 - DNA, 23 bp, Homo sapiens
  source 1..23: mol_type = genomic DNA
tagaagaaaatatagactcgagg

SEQ ID NO: 10120 - DNA, 23 bp, Homo sapiens
  source 1..23: mol_type = genomic DNA
aaaattataccatctcagaaggg

SEQ ID NO: 10121 - DNA, 23 bp, Homo sapiens
  source 1..23: mol_type = genomic DNA
gctcgtgtcatgaacttgagtgg

SEQ ID NO: 10122 - DNA, 23 bp, Homo sapiens
  source 1..23: mol_type = genomic DNA
agtagaatgagaacactatgtgg

SEQ ID NO: 10123 - DNA, 23 bp, Homo sapiens
  source 1..23: mol_type = genomic DNA
gaatcacagataacaaagcacgg

SEQ ID NO: 10124 - DNA, 23 bp, Homo sapiens
  source 1..23: mol_type = genomic DNA
aatccccttgtgatcaaaggagg

SEQ ID NO: 10125 - DNA, 23 bp, Homo sapiens
  source 1..23: mol_type = genomic DNA
tttgaggacgaacgtatgggtgg

SEQ ID NO: 10126 - DNA, 23 bp, Homo sapiens
  source 1..23: mol_type = genomic DNA
atagcctcctttgatcacaaggg

SEQ ID NO: 10127 - DNA, 23 bp, Homo sapiens
  source 1..23: mol_type = genomic DNA
ccataacgacttgatagggaggg

SEQ ID NO: 10128 - DNA, 23 bp, Homo sapiens
  source 1..23: mol_type = genomic DNA
gatttgcattttatcaatagcgg

SEQ ID NO: 10129 - DNA, 23 bp, Homo sapiens
  source 1..23: mol_type = genomic DNA
cctttctcagtatttacatgtgg

SEQ ID NO: 10130 - DNA, 23 bp, Homo sapiens
  source 1..23: mol_type = genomic DNA
agaggtgctaataaagaaggagg

SEQ ID NO: 10131 - DNA, 23 bp, Homo sapiens
  source 1..23: mol_type = genomic DNA
cagtcattctaaagtagtggggg

SEQ ID NO: 10132 - DNA, 23 bp, Homo sapiens
  source 1..23: mol_type = genomic DNA
atatcttataatatatgacaggg

SEQ ID NO: 10133 - DNA, 23 bp, Homo sapiens
  source 1..23: mol_type = genomic DNA
atttaactattaattcagcaggg

SEQ ID NO: 10134 - DNA, 23 bp, Homo sapiens
  source 1..23: mol_type = genomic DNA
tgatactaaaagaatgtgagagg

SEQ ID NO: 10135 - DNA, 23 bp, Homo sapiens
  source 1..23: mol_type = genomic DNA
ggaacgtgcacaatcatggatgg

SEQ ID NO: 10136 - DNA, 23 bp, Homo sapiens
  source 1..23: mol_type = genomic DNA
atacattgtatttagcctgaggg

SEQ ID NO: 10137 - DNA, 23 bp, Homo sapiens
  source 1..23: mol_type = genomic DNA
gaaaatatacttaggatgcacgg

SEQ ID NO: 10138 - DNA, 23 bp, Homo sapiens
  source 1..23: mol_type = genomic DNA
ggtaatcaagtgcagatccgagg

SEQ ID NO: 10139 - DNA, 23 bp, Homo sapiens
  source 1..23: mol_type = genomic DNA
atatacagctgaatggaaccagg

SEQ ID NO: 10140 - DNA, 23 bp, Homo sapiens
  source 1..23: mol_type = genomic DNA
ttatgatgataacatttagaggg

SEQ ID NO: 10141 - DNA, 23 bp, Homo sapiens
  source 1..23: mol_type = genomic DNA
aaagctaatgataaagacctggg

SEQ ID NO: 10142 - DNA, 23 bp, Homo sapiens
  source 1..23: mol_type = genomic DNA
atttagatgtgatcttcccatgg

SEQ ID NO: 10143 - DNA, 23 bp, Homo sapiens
  source 1..23: mol_type = genomic DNA
gtgactgtgtatcaacaaagagg

SEQ ID NO: 10144 - DNA, 23 bp, Homo sapiens
  source 1..23: mol_type = genomic DNA
aataacctatataaaccgacagg

SEQ ID NO: 10145 - DNA, 23 bp, Homo sapiens
  source 1..23: mol_type = genomic DNA
ggaagaggctatccttcacctgg

SEQ ID NO: 10146 - DNA, 23 bp, Homo sapiens
  source 1..23: mol_type = genomic DNA
gccagaagtcattaactgcaagg

SEQ ID NO: 10147 - DNA, 23 bp, Homo sapiens
  source 1..23: mol_type = genomic DNA
taaaatactggagtacagatggg

SEQ ID NO: 10148 - DNA, 23 bp, Homo sapiens
  source 1..23: mol_type = genomic DNA
gtaactgaacaatatatgaaagg

SEQ ID NO: 10149 - DNA, 23 bp, Homo sapiens
  source 1..23: mol_type = genomic DNA
ggtgctttgaaattttcaagtgg

SEQ ID NO: 10150 - DNA, 23 bp, Homo sapiens
  source 1..23: mol_type = genomic DNA
tagcctcctttgatcacaagggg

SEQ ID NO: 10151 - DNA, 23 bp, Homo sapiens
  source 1..23: mol_type = genomic DNA
gatgagcctcaaccaggtgaagg

SEQ ID NO: 10152 - DNA, 23 bp, Homo sapiens
  source 1..23: mol_type = genomic DNA
agtcatagtgctgttttcgaggg

SEQ ID NO: 10153 - DNA, 23 bp, Homo sapiens
  source 1..23: mol_type = genomic DNA
gcctcttccactaaggcaggtgg

SEQ ID NO: 10154 - DNA, 23 bp, Homo sapiens
  source 1..23: mol_type = genomic DNA
gagtattcagatgatacccttgg

SEQ ID NO: 10155 - DNA, 23 bp, Homo sapiens
  source 1..23: mol_type = genomic DNA
atacacagtcacttaaaatgagg

SEQ ID NO: 10156 - DNA, 23 bp, Homo sapiens
  source 1..23: mol_type = genomic DNA
atgaccataacgacttgataggg

SEQ ID NO: 10157 - DNA, 23 bp, Homo sapiens
  source 1..23: mol_type = genomic DNA
acatgctctgctgttgctagggg

SEQ ID NO: 10158 - DNA, 23 bp, Homo sapiens
  source 1..23: mol_type = genomic DNA
tcatttgaggacgaacgtatggg

SEQ ID NO: 10159 - DNA, 23 bp, Homo sapiens
  source 1..23: mol_type = genomic DNA
gctaattggaaagggatcctggg

SEQ ID NO: 10160 - DNA, 23 bp, Homo sapiens
  source 1..23: mol_type = genomic DNA
taaaagttcctgttatcatgtgg

SEQ ID NO: 10161 - DNA, 23 bp, Homo sapiens
  source 1..23: mol_type = genomic DNA
gagagttcaggttgataaagggg

SEQ ID NO: 10162 - DNA, 23 bp, Homo sapiens
  source 1..23: mol_type = genomic DNA
aattatttcaagcttttgtgggg

SEQ ID NO: 10163 - DNA, 23 bp, Homo sapiens
  source 1..23: mol_type = genomic DNA
attttacatggtgctctgaaggg

SEQ ID NO: 10164 - DNA, 23 bp, Homo sapiens
  source 1..23: mol_type = genomic DNA
tcaaagtactcctatttccaagg

SEQ ID NO: 10165 - DNA, 23 bp, Homo sapiens
  source 1..23: mol_type = genomic DNA
tgatagcaggagagcccacaggg

SEQ ID NO: 10166 - DNA, 23 bp, Homo sapiens
  source 1..23: mol_type = genomic DNA
atttaaaagctgacttctggggg

SEQ ID NO: 10167 - DNA, 23 bp, Homo sapiens
  source 1..23: mol_type = genomic DNA
agtagtgggggtacaaaagaggg

SEQ ID NO: 10168 - DNA, 23 bp, Homo sapiens
  source 1..23: mol_type = genomic DNA
gagaaagataatattgtcaaggg

SEQ ID NO: 10169 - DNA, 23 bp, Homo sapiens
  source 1..23: mol_type = genomic DNA
ctggcttgatgatttccagcggg

SEQ ID NO: 10170 - DNA, 23 bp, Homo sapiens
  source 1..23: mol_type = genomic DNA
atagtttttatagtaaaatgggg

SEQ ID NO: 10171 - DNA, 23 bp, Homo sapiens
  source 1..23: mol_type = genomic DNA
actggctaaaagcatttgaaagg

SEQ ID NO: 10172 - DNA, 23 bp, Homo sapiens
  source 1..23: mol_type = genomic DNA
tttcttactacatcacctgtcgg

SEQ ID NO: 10173 - DNA, 23 bp, Homo sapiens
  source 1..23: mol_type = genomic DNA
atataatagataccatacttagg

SEQ ID NO: 10174 - DNA, 23 bp, Homo sapiens
  source 1..23: mol_type = genomic DNA
tgctttcccacactctcactcgg

SEQ ID NO: 10175 - DNA, 23 bp, Homo sapiens
  source 1..23: mol_type = genomic DNA
ataatttagaatccgagtagtgg

SEQ ID NO: 10176 - DNA, 23 bp, Homo sapiens
  source 1..23: mol_type = genomic DNA
tgaaagatacacattttacatgg

SEQ ID NO: 10177 - DNA, 23 bp, Homo sapiens
  source 1..23: mol_type = genomic DNA
catgtttagaagccactactcgg

SEQ ID NO: 10178 - DNA, 23 bp, Homo sapiens
  source 1..23: mol_type = genomic DNA
agtcagtcattctaaagtagtgg

SEQ ID NO: 10179 - DNA, 23 bp, Homo sapiens
  source 1..23: mol_type = genomic DNA
acaattgtgcaagcttgctaagg

SEQ ID NO: 10180 - DNA, 23 bp, Homo sapiens
  source 1..23: mol_type = genomic DNA
gtatcaacaaagaggaacatagg

SEQ ID NO: 10181 - DNA, 23 bp, Homo sapiens
  source 1..23: mol_type = genomic DNA
tcgtatttgtaaaaatacaatgg

SEQ ID NO: 10182 - DNA, 23 bp, Homo sapiens
  source 1..23: mol_type = genomic DNA
tgaaaatcgccatttctcctggg

SEQ ID NO: 10183 - DNA, 23 bp, Homo sapiens
  source 1..23: mol_type = genomic DNA
tagttatttcagcatccctgtgg

SEQ ID NO: 10184 - DNA, 23 bp, Homo sapiens
  source 1..23: mol_type = genomic DNA
gagttatcttctcctatcagagg

SEQ ID NO: 10185 - DNA, 23 bp, Homo sapiens
  source 1..23: mol_type = genomic DNA
aatctggatatacagctgaatgg

SEQ ID NO: 10186 - DNA, 23 bp, Homo sapiens
  source 1..23: mol_type = genomic DNA
gaggaacagaggtctgaaagagg

SEQ ID NO: 10187 - DNA, 23 bp, Homo sapiens
  source 1..23: mol_type = genomic DNA
agttatttcagcatccctgtggg

SEQ ID NO: 10188 - DNA, 23 bp, Homo sapiens
  source 1..23: mol_type = genomic DNA
atgaacttctgttttcaggtagg

SEQ ID NO: 10189 - DNA, 23 bp, Homo sapiens
  source 1..23: mol_type = genomic DNA
tcaaatccccttgtgatcaaagg

SEQ ID NO: 10190 - DNA, 23 bp, Homo sapiens
  source 1..23: mol_type = genomic DNA
gaaagcttatgaagaactgctgg

SEQ ID NO: 10191 - DNA, 23 bp, Homo sapiens
  source 1..23: mol_type = genomic DNA
ttcccatgttttcaagaccaagg

SEQ ID NO: 10192 - DNA, 23 bp, Homo sapiens
  source 1..23: mol_type = genomic DNA
tttctcctctaagatgctcaggg

SEQ ID NO: 10193 - DNA, 23 bp, Homo sapiens
  source 1..23: mol_type = genomic DNA
aaaaagttgattctgaaagaggg

SEQ ID NO: 10194 - DNA, 23 bp, Homo sapiens
  source 1..23: mol_type = genomic DNA
cccagagatgagcctcaaccagg

SEQ ID NO: 10195 - DNA, 23 bp, Homo sapiens
  source 1..23: mol_type = genomic DNA
gttagagaagatacagaaagagg

SEQ ID NO: 10196 - DNA, 23 bp, Homo sapiens
  source 1..23: mol_type = genomic DNA
tttaccttgatgtttccctcagg

SEQ ID NO: 10197 - DNA, 23 bp, Homo sapiens
  source 1..23: mol_type = genomic DNA
ttctgtgagttaatgggagacgg

SEQ ID NO: 10198 - DNA, 23 bp, Homo sapiens
  source 1..23: mol_type = genomic DNA
agttatcttctcctatcagaggg

SEQ ID NO: 10199 - DNA, 23 bp, Homo sapiens
  source 1..23: mol_type = genomic DNA
taagacagctttgatcaggcagg

SEQ ID NO: 10200 - DNA, 23 bp, Homo sapiens
  source 1..23: mol_type = genomic DNA
tcccatgttttcaagaccaaggg

SEQ ID NO: 10201 - DNA, 23 bp, Homo sapiens
  source 1..23: mol_type = genomic DNA
gagcacatatttcagtttgtcgg

SEQ ID NO: 10202 - DNA, 23 bp, Homo sapiens
  source 1..23: mol_type = genomic DNA
tgaaaagtaattttatccatggg

SEQ ID NO: 10203 - DNA, 23 bp, Homo sapiens
  source 1..23: mol_type = genomic DNA
ccacatgtaaatactgagaaagg

SEQ ID NO: 10204 - DNA, 23 bp, Homo sapiens
  source 1..23: mol_type = genomic DNA
ttatgaacatggcaatttcgagg

SEQ ID NO: 10205 - DNA, 23 bp, Homo sapiens
  source 1..23: mol_type = genomic DNA
atagcctcttccactaaggcagg

SEQ ID NO: 10206 - DNA, 23 bp, Homo sapiens
  source 1..23: mol_type = genomic DNA
ggaattgtctctgttaggtgagg

SEQ ID NO: 10207 - DNA, 23 bp, Homo sapiens
  source 1..23: mol_type = genomic DNA
ataaaacttcctatttgtgaagg

SEQ ID NO: 10208 - DNA, 23 bp, Homo sapiens
  source 1..23: mol_type = genomic DNA
gtgtttactacccagagtatagg

SEQ ID NO: 10209 - DNA, 23 bp, Homo sapiens
  source 1..23: mol_type = genomic DNA
attattgatctgattctcacagg

SEQ ID NO: 10210 - DNA, 23 bp, Homo sapiens
  source 1..23: mol_type = genomic DNA
tttttaggctgcttgaaaaaggg

SEQ ID NO: 10211 - DNA, 23 bp, Homo sapiens
  source 1..23: mol_type = genomic DNA
gtaaaatactggagtacagatgg

SEQ ID NO: 10212 - DNA, 23 bp, Homo sapiens
  source 1..23: mol_type = genomic DNA
taagttactcttcagtcaaaggg

SEQ ID NO: 10213 - DNA, 23 bp, Homo sapiens
  source 1..23: mol_type = genomic DNA
gaattgtctctgttaggtgaggg

SEQ ID NO: 10214 - DNA, 23 bp, Homo sapiens
  source 1..23: mol_type = genomic DNA
ggttattttaaactcatggcagg

SEQ ID NO: 10215 - DNA, 23 bp, Homo sapiens
  source 1..23: mol_type = genomic DNA
atttgcattttatcaatagcggg

SEQ ID NO: 10216 - DNA, 23 bp, Homo sapiens
  source 1..23: mol_type = genomic DNA
tgttgctaggggtatttcaatgg

SEQ ID NO: 10217 - DNA, 23 bp, Homo sapiens
  source 1..23: mol_type = genomic DNA
aagacttcatttacatccacagg

SEQ ID NO: 10218 - DNA, 23 bp, Homo sapiens
  source 1..23: mol_type = genomic DNA
aactttttaccaactcccgctgg

SEQ ID NO: 10219 - DNA, 23 bp, Homo sapiens
  source 1..23: mol_type = genomic DNA
tgatgagagtaccttgttcgtgg

SEQ ID NO: 10220 - DNA, 23 bp, Homo sapiens
  source 1..23: mol_type = genomic DNA
gtatctttcagctaagagatagg

SEQ ID NO: 10221 - DNA, 23 bp, Homo sapiens
  source 1..23: mol_type = genomic DNA
agaaagaggaggcttttaagagg

SEQ ID NO: 10222 - DNA, 23 bp, Homo sapiens
  source 1..23: mol_type = genomic DNA
acaggcagagtaaataaaatggg

SEQ ID NO: 10223 - DNA, 23 bp, Homo sapiens
  source 1..23: mol_type = genomic DNA
ttttacctgctaattggaaaggg

SEQ ID NO: 10224 - DNA, 23 bp, Homo sapiens
  source 1..23: mol_type = genomic DNA
gattcttctgtgactgactaggg

SEQ ID NO: 10225 - DNA, 23 bp, Homo sapiens
  source 1..23: mol_type = genomic DNA
tgacagagtgaaacatcttaagg

SEQ ID NO: 10226 - DNA, 23 bp, Homo sapiens
  source 1..23: mol_type = genomic DNA
gataatattgtcaagggcagagg

SEQ ID NO: 10227 - DNA, 23 bp, Homo sapiens
  source 1..23: mol_type = genomic DNA
ttggtttgtgtgttaggcatggg

SEQ ID NO: 10228 - DNA, 23 bp, Homo sapiens
  source 1..23: mol_type = genomic DNA
aggatccctttccaattagcagg

SEQ ID NO: 10229 - DNA, 23 bp, Homo sapiens
  source 1..23: mol_type = genomic DNA
ggtcttgaaaacatgggaaaggg

SEQ ID NO: 10230 - DNA, 23 bp, Homo sapiens
  source 1..23: mol_type = genomic DNA
gcactttaagagagcattgtggg

SEQ ID NO: 10231 - DNA, 23 bp, Homo sapiens
  source 1..23: mol_type = genomic DNA
ttgtttgctgtgatttttgaggg

SEQ ID NO: 10232 - DNA, 23 bp, Homo sapiens
  source 1..23: mol_type = genomic DNA
atattctaggacacaatcttggg

SEQ ID NO: 10233 - DNA, 23 bp, Homo sapiens
  source 1..23: mol_type = genomic DNA
aatatcttataatatatgacagg

SEQ ID NO: 10234 - DNA, 23 bp, Homo sapiens
  source 1..23: mol_type = genomic DNA
ctaaaagatgaaaacacaaccgg

SEQ ID NO: 10235 - DNA, 23 bp, Homo sapiens
  source 1..23: mol_type = genomic DNA
atacttattagtaatttcaatgg

SEQ ID NO: 10236 - DNA, 23 bp, Homo sapiens
  source 1..23: mol_type = genomic DNA
ttaagaggtgctaataaagaagg

SEQ ID NO: 10237 - DNA, 23 bp, Homo sapiens
  source 1..23: mol_type = genomic DNA
aatggtctctgacagtctatagg

SEQ ID NO: 10238 - DNA, 23 bp, Homo sapiens
  source 1..23: mol_type = genomic DNA
tctggctttgggctcttcctcgg

SEQ ID NO: 10239 - DNA, 23 bp, Homo sapiens
  source 1..23: mol_type = genomic DNA
aagcaccctgagcatcttagagg

SEQ ID NO: 10240 - DNA, 23 bp, Homo sapiens
  source 1..23: mol_type = genomic DNA
ccctccctatcaagtcgttatgg

SEQ ID NO: 10241 - DNA, 23 bp, Homo sapiens
  source 1..23: mol_type = genomic DNA
tgagagttcaggttgataaaggg

SEQ ID NO: 10242 - DNA, 23 bp, Homo sapiens
  source 1..23: mol_type = genomic DNA
gttcaaaatgtaactcttaaggg

SEQ ID NO: 10243 - DNA, 23 bp, Homo sapiens
  source 1..23: mol_type = genomic DNA
ataggtaaccacatgataacagg

SEQ ID NO: 10244 - DNA, 23 bp, Homo sapiens
  source 1..23: mol_type = genomic DNA
acaaggaaaaaattatgcttagg

SEQ ID NO: 10245 - DNA, 23 bp, Homo sapiens
  source 1..23: mol_type = genomic DNA
ataaaatgcaaatcgttcatagg

SEQ ID NO: 10246 - DNA, 23 bp, Homo sapiens
  source 1..23: mol_type = genomic DNA
tattttctcattgaagactttgg

SEQ ID NO: 10247 - DNA, 23 bp, Homo sapiens
  source 1..23: mol_type = genomic DNA
agaattataaatactaaaatggg

SEQ ID NO: 10248 - DNA, 23 bp, Homo sapiens
  source 1..23: mol_type = genomic DNA
tttcaagtatacttctttgaagg

SEQ ID NO: 10249 - DNA, 23 bp, Homo sapiens
  source 1..23: mol_type = genomic DNA
acttgaacgtgaagtggctttgg

SEQ ID NO: 10250 - DNA, 23 bp, Homo sapiens
  source 1..23: mol_type = genomic DNA
ctatcttgcaaagtaaaaactgg

SEQ ID NO: 10251 - DNA, 23 bp, Homo sapiens
  source 1..23: mol_type = genomic DNA
atttcatgtcccattttagtagg

SEQ ID NO: 10252 - DNA, 23 bp, Homo sapiens
  source 1..23: mol_type = genomic DNA
ttagccagttagcatatcatagg

SEQ ID NO: 10253 - DNA, 23 bp, Homo sapiens
  source 1..23: mol_type = genomic DNA
agacatgctctgctgttgctagg

SEQ ID NO: 10254 - DNA, 23 bp, Homo sapiens
  source 1..23: mol_type = genomic DNA
gttgtagcaagtcatgaaaatgg

SEQ ID NO: 10255 - DNA, 23 bp, Homo sapiens
  source 1..23: mol_type = genomic DNA
gagcacatggtaacgcaaattgg

SEQ ID NO: 10256 - DNA, 23 bp, Homo sapiens
  source 1..23: mol_type = genomic DNA
gtgaatgatggggaaagtttagg

SEQ ID NO: 10257 - DNA, 23 bp, Homo sapiens
  source 1..23: mol_type = genomic DNA
cattccttgtgatatcttgttgg

SEQ ID NO: 10258 - DNA, 23 bp, Homo sapiens
  source 1..23: mol_type = genomic DNA
catgcatctttgtatatgattgg

SEQ ID NO: 10259 - DNA, 23 bp, Homo sapiens
  source 1..23: mol_type = genomic DNA
gatgaccataacgacttgatagg

SEQ ID NO: 10260 - DNA, 23 bp, Homo sapiens
  source 1..23: mol_type = genomic DNA
gctgttttcgagggtaaaattgg

SEQ ID NO: 10261 - DNA, 23 bp, Homo sapiens
  source 1..23: mol_type = genomic DNA
tctgcagttgcatttaagatagg

SEQ ID NO: 10262 - DNA, 23 bp, Homo sapiens
  source 1..23: mol_type = genomic DNA
catcacctgtcggtttatatagg

SEQ ID NO: 10263 - DNA, 23 bp, Homo sapiens
  source 1..23: mol_type = genomic DNA
gagaaattggaagcattaactgg

SEQ ID NO: 10264 - DNA, 23 bp, Homo sapiens
  source 1..23: mol_type = genomic DNA
tatgtgctcattctacttaaagg

SEQ ID NO: 10265 - DNA, 23 bp, Homo sapiens
  source 1..23: mol_type = genomic DNA
ataacagagataggagaaattgg

SEQ ID NO: 10266 - DNA, 23 bp, Homo sapiens
  source 1..23: mol_type = genomic DNA
tcaatggatattattcaaaaagg

SEQ ID NO: 10267 - DNA, 23 bp, Homo sapiens
  source 1..23: mol_type = genomic DNA
ttttaggctttcattaaaaatgg

SEQ ID NO: 10268 - DNA, 23 bp, Homo sapiens
  source 1..23: mol_type = genomic DNA
ttttaatgaaagcctaaaaatgg

SEQ ID NO: 10269 - DNA, 23 bp, Homo sapiens
  source 1..23: mol_type = genomic DNA
atataacatttaccttttaatgg

SEQ ID NO: 10270 - DNA, 23 bp, Homo sapiens
  source 1..23: mol_type = genomic DNA
tatttctgctaaattatttatgg

SEQ ID NO: 10271 - DNA, 23 bp, Homo sapiens
  source 1..23: mol_type = genomic DNA
aagaatgtatgtgtcttacgtgg

SEQ ID NO: 10272 - DNA, 23 bp, Homo sapiens
  source 1..23: mol_type = genomic DNA
acttctgaggaaactatacgtgg

SEQ ID NO: 10273 - DNA, 23 bp, Homo sapiens
  source 1..23: mol_type = genomic DNA
gcagataccagggaacactgggg

SEQ ID NO: 10274 - DNA, 23 bp, Homo sapiens
  source 1..23: mol_type = genomic DNA
ctgttgttgtgggaaatgagtgg

SEQ ID NO: 10275 - DNA, 23 bp, Homo sapiens
  source 1..23: mol_type = genomic DNA
gtgataatacagtttctaggggg

SEQ ID NO: 10276 - DNA, 23 bp, Homo sapiens
  source 1..23: mol_type = genomic DNA
aaaacatttcaaaaaaaacgtgg

SEQ ID NO: 10277 - DNA, 23 bp, Homo sapiens
  source 1..23: mol_type = genomic DNA
atatgctgcctgctcaacaaggg

SEQ ID NO: 10278 - DNA, 23 bp, Homo sapiens
  source 1..23: mol_type = genomic DNA
cataatgctactcaggatggcgg

SEQ ID NO: 10279 - DNA, 23 bp, Homo sapiens
  source 1..23: mol_type = genomic DNA
agataccagggaacactgggggg

SEQ ID NO: 10280 - DNA, 23 bp, Homo sapiens
  source 1..23: mol_type = genomic DNA
ctaagtataaaagaagtccgtgg

SEQ ID NO: 10281 - DNA, 23 bp, Homo sapiens
  source 1..23: mol_type = genomic DNA
ggagtacctactatgtaccatgg

SEQ ID NO: 10282 - DNA, 23 bp, Homo sapiens
  source 1..23: mol_type = genomic DNA
tctcttgtgtgaaaattaggggg

SEQ ID NO: 10283 - DNA, 23 bp, Homo sapiens
  source 1..23: mol_type = genomic DNA
agtcgttgaggtaataacgttgg

SEQ ID NO: 10284 - DNA, 23 bp, Homo sapiens
  source 1..23: mol_type = genomic DNA
attctattagatactgccagtgg

SEQ ID NO: 10285 - DNA, 23 bp, Homo sapiens
  source 1..23: mol_type = genomic DNA
aataaatatattgcacccagagg

SEQ ID NO: 10286 - DNA, 23 bp, Homo sapiens
  source 1..23: mol_type = genomic DNA
agcccaaaagtacagttgagtgg

SEQ ID NO: 10287 - DNA, 23 bp, Homo sapiens
  source 1..23: mol_type = genomic DNA
tgaagtacttgcatggaaggtgg

SEQ ID NO: 10288 - DNA, 23 bp, Homo sapiens
  source 1..23: mol_type = genomic DNA
gtgaaacgtcaacatgaaccagg

SEQ ID NO: 10289 - DNA, 23 bp, Homo sapiens
  source 1..23: mol_type = genomic DNA
aatcaaactgcccagtactgagg

SEQ ID NO: 10290 - DNA, 23 bp, Homo sapiens
  source 1..23: mol_type = genomic DNA
agatctctgtaggtacatgaggg

SEQ ID NO: 10291 - DNA, 23 bp, Homo sapiens
  source 1..23: mol_type = genomic DNA
catctataatagcaaaaaggggg

SEQ ID NO: 10292 - DNA, 23 bp, Homo sapiens
  source 1..23: mol_type = genomic DNA
ttattcacagactatttcagggg

SEQ ID NO: 10293 - DNA, 23 bp, Homo sapiens
  source 1..23: mol_type = genomic DNA
gaggaacagccatttacatgagg

SEQ ID NO: 10294 - DNA, 23 bp, Homo sapiens
  source 1..23: mol_type = genomic DNA
gcattatactaagtgtcatgtgg

SEQ ID NO: 10295 - DNA, 23 bp, Homo sapiens
  source 1..23: mol_type = genomic DNA
acctgtgaagacaagttctgagg

SEQ ID NO: 10296 - DNA, 23 bp, Homo sapiens
  source 1..23: mol_type = genomic DNA
acttaatgagggcaagtgagagg

SEQ ID NO: 10297 - DNA, 23 bp, Homo sapiens
  source 1..23: mol_type = genomic DNA
agcagttagaagtccatgaaggg

SEQ ID NO: 10298 - DNA, 23 bp, Homo sapiens
  source 1..23: mol_type = genomic DNA
ttattacaaaacaggaatgacgg

SEQ ID NO: 10299 - DNA, 23 bp, Homo sapiens
  source 1..23: mol_type = genomic DNA
taagctttggatcataaccctgg

SEQ ID NO: 10300 - DNA, 23 bp, Homo sapiens
  source 1..23: mol_type = genomic DNA
atctcattaaaaatatatcaggg

SEQ ID NO: 10301 - DNA, 23 bp, Homo sapiens
  source 1..23: mol_type = genomic DNA
cagataccagggaacactggggg

SEQ ID NO: 10302 - DNA, 23 bp, Homo sapiens
  source 1..23: mol_type = genomic DNA
gtgcaagttagcaaaaccacagg

SEQ ID NO: 10303 - DNA, 23 bp, Homo sapiens
  source 1..23: mol_type = genomic DNA
gctactcattcatgatgaagggg

SEQ ID NO: 10304 - DNA, 23 bp, Homo sapiens
  source 1..23: mol_type = genomic DNA
tatgtagctcctgtaggccacgg

SEQ ID NO: 10305 - DNA, 23 bp, Homo sapiens
  source 1..23: mol_type = genomic DNA
gctaactttggcagataccaggg

SEQ ID NO: 10306 - DNA, 23 bp, Homo sapiens
  source 1..23: mol_type = genomic DNA
actgatgcctttcatgaccaagg

SEQ ID NO: 10307 - DNA, 23 bp, Homo sapiens
  source 1..23: mol_type = genomic DNA
ccaaaaggaagagcctctgtggg

SEQ ID NO: 10308 - DNA, 23 bp, Homo sapiens
  source 1..23: mol_type = genomic DNA
tatattgcaacattttttggggg

SEQ ID NO: 10309 - DNA, 23 bp, Homo sapiens
  source 1..23: mol_type = genomic DNA
atgtaaaaagaatatatacatgg

SEQ ID NO: 10310 - DNA, 23 bp, Homo sapiens
  source 1..23: mol_type = genomic DNA
aatagaacattagactatcaggg

SEQ ID NO: 10311 - DNA, 23 bp, Homo sapiens
  source 1..23: mol_type = genomic DNA
ccatacatagcatgaaagcatgg

SEQ ID NO: 10312 - DNA, 23 bp, Homo sapiens
  source 1..23: mol_type = genomic DNA
tccatagcctaagcttgggaagg

SEQ ID NO: 10313 - DNA, 23 bp, Homo sapiens
  source 1..23: mol_type = genomic DNA
aaatgacatagcatattccatgg

SEQ ID NO: 10314 - DNA, 23 bp, Homo sapiens
  source 1..23: mol_type = genomic DNA
tgaaagtacaaaatttaccatgg

SEQ ID NO: 10315 - DNA, 23 bp, Homo sapiens
  source 1..23: mol_type = genomic DNA
aaaagtaatacccctagtgaggg

SEQ ID NO: 10316 - DNA, 23 bp, Homo sapiens
  source 1..23: mol_type = genomic DNA
ttaatggggaaacagagctatgg

SEQ ID NO: 10317 - DNA, 23 bp, Homo sapiens
  source 1..23: mol_type = genomic DNA
tctttactggtagaacaaaaggg

SEQ ID NO: 10318 - DNA, 23 bp, Homo sapiens
  source 1..23: mol_type = genomic DNA
atgagtggtttatacaagagtgg

SEQ ID NO: 10319 - DNA, 23 bp, Homo sapiens
  source 1..23: mol_type = genomic DNA
accatggttacaatgtagaaggg

SEQ ID NO: 10320 - DNA, 23 bp, Homo sapiens
  source 1..23: mol_type = genomic DNA
ttagaatatgtagctcctgtagg

SEQ ID NO: 10321 - DNA, 23 bp, Homo sapiens
  source 1..23: mol_type = genomic DNA
aagctctgatgggagctggaagg

SEQ ID NO: 10322 - DNA, 23 bp, Homo sapiens
  source 1..23: mol_type = genomic DNA
gcagttctgaagtacttgcatgg

SEQ ID NO: 10323 - DNA, 23 bp, Homo sapiens
  source 1..23: mol_type = genomic DNA
tgtatggttgacctttctcaggg

SEQ ID NO: 10324 - DNA, 23 bp, Homo sapiens
  source 1..23: mol_type = genomic DNA
gaatcttccttcccaagcttagg

SEQ ID NO: 10325 - DNA, 23 bp, Homo sapiens
  source 1..23: mol_type = genomic DNA
tcccttctacattgtaaccatgg

SEQ ID NO: 10326 - DNA, 23 bp, Homo sapiens
  source 1..23: mol_type = genomic DNA
aacccagaaaactttatcaaggg

SEQ ID NO: 10327 - DNA, 23 bp, Homo sapiens
  source 1..23: mol_type = genomic DNA
ttctcattttaattgaagagagg

SEQ ID NO: 10328 - DNA, 23 bp, Homo sapiens
  source 1..23: mol_type = genomic DNA
aagcagttagaagtccatgaagg

SEQ ID NO: 10329 - DNA, 23 bp, Homo sapiens
  source 1..23: mol_type = genomic DNA
agattttgtcagatgggtgaggg

SEQ ID NO: 10330 - DNA, 23 bp, Homo sapiens
  source 1..23: mol_type = genomic DNA
aaagtgctcaaagctctgatggg

SEQ ID NO: 10331 - DNA, 23 bp, Homo sapiens
  source 1..23: mol_type = genomic DNA
ggaaactgttaacttaatgaggg

SEQ ID NO: 10332 - DNA, 23 bp, Homo sapiens
  source 1..23: mol_type = genomic DNA
acatagtaggtactccagaatgg

SEQ ID NO: 10333 - DNA, 23 bp, Homo sapiens
  source 1..23: mol_type = genomic DNA
ctataatagcaaaaagggggagg

SEQ ID NO: 10334 - DNA, 23 bp, Homo sapiens
  source 1..23: mol_type = genomic DNA
acattagactatcagggcagagg

SEQ ID NO: 10335 - DNA, 23 bp, Homo sapiens
  source 1..23: mol_type = genomic DNA
ccctctgaaatacacctgaaggg

SEQ ID NO: 10336 - DNA, 23 bp, Homo sapiens
  source 1..23: mol_type = genomic DNA
tatgctgagaagacaggataggg

SEQ ID NO: 10337 - DNA, 23 bp, Homo sapiens
  source 1..23: mol_type = genomic DNA
atatgctgagaagacaggatagg

SEQ ID NO: 10338 - DNA, 23 bp, Homo sapiens
  source 1..23: mol_type = genomic DNA
gcttcatagacatttagaaacgg

SEQ ID NO: 10339 - DNA, 23 bp, Homo sapiens
  source 1..23: mol_type = genomic DNA
tagtggcataataatatgagtgg

SEQ ID NO: 10340 - DNA, 23 bp, Homo sapiens
  source 1..23: mol_type = genomic DNA
cctataggaaatgtctccactgg

SEQ ID NO: 10341 - DNA, 23 bp, Homo sapiens
  source 1..23: mol_type = genomic DNA
gtctgtatacaaatgtggcatgg

SEQ ID NO: 10342 - DNA, 23 bp, Homo sapiens
  source 1..23: mol_type = genomic DNA
cctttcaccataatttctagagg

SEQ ID NO: 10343 - DNA, 23 bp, Homo sapiens
  source 1..23: mol_type = genomic DNA
aaatatatcagggaagaaggagg

SEQ ID NO: 10344 - DNA, 23 bp, Homo sapiens
  source 1..23: mol_type = genomic DNA
ctctcttgtgtgaaaattagggg

SEQ ID NO: 10345 - DNA, 23 bp, Homo sapiens
  source 1..23: mol_type = genomic DNA
tggagttttaggacaacctaggg

SEQ ID NO: 10346 - DNA, 23 bp, Homo sapiens
  source 1..23: mol_type = genomic DNA
agtaatgatccatttcctctggg

SEQ ID NO: 10347 - DNA, 23 bp, Homo sapiens
  source 1..23: mol_type = genomic DNA
aaccaaatacagtcagtcatggg

SEQ ID NO: 10348 - DNA, 23 bp, Homo sapiens
  source 1..23: mol_type = genomic DNA
atttctgattaattcagtgtagg

SEQ ID NO: 10349 - DNA, 23 bp, Homo sapiens
  source 1..23: mol_type = genomic DNA
tcaatccagcatcagtctatcgg

SEQ ID NO: 10350 - DNA, 23 bp, Homo sapiens
  source 1..23: mol_type = genomic DNA
atctcacatgattataaatgtgg

SEQ ID NO: 10351 - DNA, 23 bp, Homo sapiens
  source 1..23: mol_type = genomic DNA
gctttaaaatacttgggcagggg

SEQ ID NO: 10352 - DNA, 23 bp, Homo sapiens
  source 1..23: mol_type = genomic DNA
tgaaaggccttggtcatgaaagg

SEQ ID NO: 10353 - DNA, 23 bp, Homo sapiens
  source 1..23: mol_type = genomic DNA
aaagaactggaacatccataagg

SEQ ID NO: 10354 - DNA, 23 bp, Homo sapiens
  source 1..23: mol_type = genomic DNA
gcaaccagattttgtcagatggg

SEQ ID NO: 10355 - DNA, 23 bp, Homo sapiens
  source 1..23: mol_type = genomic DNA
tctgtgggtgtgtgtgagcacgg

SEQ ID NO: 10356 - DNA, 23 bp, Homo sapiens
  source 1..23: mol_type = genomic DNA
cattagactatcagggcagaggg

SEQ ID NO: 10357 - DNA, 23 bp, Homo sapiens
  source 1..23: mol_type = genomic DNA
tatctccatagcctaagcttggg

SEQ ID NO: 10358 - DNA, 23 bp, Homo sapiens
  source 1..23: mol_type = genomic DNA
tggtaagtaaaactacatgcagg

SEQ ID NO: 10359 - DNA, 23 bp, Homo sapiens
  source 1..23: mol_type = genomic DNA
aatttatattgccctcactaggg

SEQ ID NO: 10360 - DNA, 23 bp, Homo sapiens
  source 1..23: mol_type = genomic DNA
ttgcttccttaagcattaggagg

SEQ ID NO: 10361 - DNA, 23 bp, Homo sapiens
  source 1..23: mol_type = genomic DNA
atactttgcaccatcaaatgagg

SEQ ID NO: 10362 - DNA, 23 bp, Homo sapiens
  source 1..23: mol_type = genomic DNA
ttttgctgaactttaagtgaggg

SEQ ID NO: 10363 - DNA, 23 bp, Homo sapiens
  source 1..23: mol_type = genomic DNA
gtagctgtgcatattgaaaaggg

SEQ ID NO: 10364 - DNA, 23 bp, Homo sapiens
  source 1..23: mol_type = genomic DNA
ttgaaaataaaaacgcaaaaggg

SEQ ID NO: 10365 - DNA, 23 bp, Homo sapiens
  source 1..23: mol_type = genomic DNA
tagggatttgataaacacatagg

SEQ ID NO: 10366 - DNA, 23 bp, Homo sapiens
  source 1..23: mol_type = genomic DNA
ggctactcattcatgatgaaggg

SEQ ID NO: 10367 - DNA, 23 bp, Homo sapiens
  source 1..23: mol_type = genomic DNA
aaaatgtctctagtaaaaagagg

SEQ ID NO: 10368 - DNA, 23 bp, Homo sapiens
  source 1..23: mol_type = genomic DNA
ctttcagtctgtgggttcagggg

SEQ ID NO: 10369 - DNA, 23 bp, Homo sapiens
  source 1..23: mol_type = genomic DNA
aactacagtgaagtaccaatagg

SEQ ID NO: 10370 - DNA, 23 bp, Homo sapiens
  source 1..23: mol_type = genomic DNA
taggtactccagaatggtaatgg

SEQ ID NO: 10371 - DNA, 23 bp, Homo sapiens
  source 1..23: mol_type = genomic DNA
gcagtatccgttaaaatctaggg

SEQ ID NO: 10372 - DNA, 23 bp, Homo sapiens
  source 1..23: mol_type = genomic DNA
tttagaatgaaattccaagatgg

SEQ ID NO: 10373 - DNA, 23 bp, Homo sapiens
  source 1..23: mol_type = genomic DNA
ccagtggagacatttcctatagg

SEQ ID NO: 10374 - DNA, 23 bp, Homo sapiens
  source 1..23: mol_type = genomic DNA
agacttcttttttaaatgagagg

SEQ ID NO: 10375 - DNA, 23 bp, Homo sapiens
  source 1..23: mol_type = genomic DNA
atatttttaatgagatacaatgg

SEQ ID NO: 10376 - DNA, 23 bp, Homo sapiens
  source 1..23: mol_type = genomic DNA
cttttggcttcagtgtacattgg

SEQ ID NO: 10377 - DNA, 23 bp, Homo sapiens
  source 1..23: mol_type = genomic DNA
gaatttatgccccaaaatgcagg

SEQ ID NO: 10378 - DNA, 23 bp, Homo sapiens
  source 1..23: mol_type = genomic DNA
ggtcgaactgatacgtcattagg

SEQ ID NO: 10379 - DNA, 23 bp, Homo sapiens
  source 1..23: mol_type = genomic DNA
atatctccatagcctaagcttgg

SEQ ID NO: 10380 - DNA, 23 bp, Homo sapiens
  source 1..23: mol_type = genomic DNA
gctaaaactctcatgatcactgg

SEQ ID NO: 10381 - DNA, 23 bp, Homo sapiens
  source 1..23: mol_type = genomic DNA
tgaattatgttatttgaggtggg

SEQ ID NO: 10382 - DNA, 23 bp, Homo sapiens
  source 1..23: mol_type = genomic DNA
agaacgtctctagaaacataagg

SEQ ID NO: 10383 - DNA, 23 bp, Homo sapiens
  source 1..23: mol_type = genomic DNA
gcaacatcacgctgtgctatggg

SEQ ID NO: 10384 - DNA, 23 bp, Homo sapiens
  source 1..23: mol_type = genomic DNA
tcactttgtgtccctgagaaagg

SEQ ID NO: 10385 - DNA, 23 bp, Homo sapiens
  source 1..23: mol_type = genomic DNA
tccttcccaagcttaggctatgg

SEQ ID NO: 10386 - DNA, 23 bp, Homo sapiens
  source 1..23: mol_type = genomic DNA
aaaaagttacttaaaagtaaagg

SEQ ID NO: 10387 - DNA, 23 bp, Homo sapiens
  source 1..23: mol_type = genomic DNA
tgactaatatgggatatagaagg

SEQ ID NO: 10388 - DNA, 23 bp, Homo sapiens
  source 1..23: mol_type = genomic DNA
attatttttttctttctagaggg

SEQ ID NO: 10389 - DNA, 23 bp, Homo sapiens
  source 1..23: mol_type = genomic DNA
gcctgctttaaaactatacatgg

SEQ ID NO: 10390 - DNA, 23 bp, Homo sapiens
  source 1..23: mol_type = genomic DNA
ttgtgtttcaaatgaattgaggg

SEQ ID NO: 10391 - DNA, 23 bp, Homo sapiens
  source 1..23: mol_type = genomic DNA
tgttttgtgttattctaccctgg

SEQ ID NO: 10392 - DNA, 23 bp, Homo sapiens
  source 1..23: mol_type = genomic DNA
gtctctttctttcacacacatgg

SEQ ID NO: 10393 - DNA, 23 bp, Homo sapiens
  source 1..23: mol_type = genomic DNA
atccaaagcttacatattgacgg

SEQ ID NO: 10394 - DNA, 23 bp, Homo sapiens
  source 1..23: mol_type = genomic DNA
ggaaactatacgtggttaagagg

SEQ ID NO: 10395 - DNA, 23 bp, Homo sapiens
  source 1..23: mol_type = genomic DNA
tgttcttttgagatctctgtagg

SEQ ID NO: 10396 - DNA, 23 bp, Homo sapiens
  source 1..23: mol_type = genomic DNA
catattccatggtacatagtagg

SEQ ID NO: 10397 - DNA, 23 bp, Homo sapiens
  source 1..23: mol_type = genomic DNA
gagtgaacaagtttaagaacagg

SEQ ID NO: 10398 - DNA, 23 bp, Homo sapiens
  source 1..23: mol_type = genomic DNA
tagaagggaacctcatttgatgg

SEQ ID NO: 10399 - DNA, 23 bp, Homo sapiens
  source 1..23: mol_type = genomic DNA
tgttccttgaacgacaaaaacgg

SEQ ID NO: 10400 - DNA, 23 bp, Homo sapiens
  source 1..23: mol_type = genomic DNA
acatgaaccaggtattaaacagg

SEQ ID NO: 10401 - DNA, 23 bp, Homo sapiens
  source 1..23: mol_type = genomic DNA
aataatacactgaaaggccttgg

SEQ ID NO: 10402 - DNA, 23 bp, Homo sapiens
  source 1..23: mol_type = genomic DNA
ttatttagatgtatgttgcttgg

SEQ ID NO: 10403 - DNA, 23 bp, Homo sapiens
  source 1..23: mol_type = genomic DNA
tggcagataccagggaacactgg

SEQ ID NO: 10404 - DNA, 23 bp, Homo sapiens
  source 1..23: mol_type = genomic DNA
ttaacagtttcctgagaccaggg

SEQ ID NO: 10405 - DNA, 23 bp, Homo sapiens
  source 1..23: mol_type = genomic DNA
ttatgtcagcattaattggttgg

SEQ ID NO: 10406 - DNA, 23 bp, Homo sapiens
  source 1..23: mol_type = genomic DNA
tgatttagataatcttcttaggg

SEQ ID NO: 10407 - DNA, 23 bp, Homo sapiens
  source 1..23: mol_type = genomic DNA
attaacacagtcaaccaaacagg

SEQ ID NO: 10408 - DNA, 23 bp, Homo sapiens
  source 1..23: mol_type = genomic DNA
acggatactgcagagcctattgg

SEQ ID NO: 10409 - DNA, 23 bp, Homo sapiens
  source 1..23: mol_type = genomic DNA
aacctgtccctagattttaacgg

SEQ ID NO: 10410 - DNA, 23 bp, Homo sapiens
  source 1..23: mol_type = genomic DNA
ttttcctttctatacaaaaaggg

SEQ ID NO: 10411 - DNA, 23 bp, Homo sapiens
  source 1..23: mol_type = genomic DNA
atcataatacttttttcaaacgg

SEQ ID NO: 10412 - DNA, 23 bp, Homo sapiens
  source 1..23: mol_type = genomic DNA
tgagttcattggaagaaaatggg

SEQ ID NO: 10413 - DNA, 23 bp, Homo sapiens
  source 1..23: mol_type = genomic DNA
cttattccttcctcagtactggg

SEQ ID NO: 10414 - DNA, 23 bp, Homo sapiens
  source 1..23: mol_type = genomic DNA
acatttttaattttaaaaatggg

SEQ ID NO: 10415 - DNA, 23 bp, Homo sapiens
  source 1..23: mol_type = genomic DNA
ttttttgcctgtttaatacctgg

SEQ ID NO: 10416 - DNA, 23 bp, Homo sapiens
  source 1..23: mol_type = genomic DNA
gatcatttctttcagtctgtggg

SEQ ID NO: 10417 - DNA, 23 bp, Homo sapiens
  source 1..23: mol_type = genomic DNA
taaaagttcgaagagtagtttgg

SEQ ID NO: 10418 - DNA, 23 bp, Homo sapiens
  source 1..23: mol_type = genomic DNA
gatactataattatgtaataggg

SEQ ID NO: 10419 - DNA, 23 bp, Homo sapiens
  source 1..23: mol_type = genomic DNA
ataaaaacagacatatgtttagg

SEQ ID NO: 10420 - DNA, 23 bp, Homo sapiens
  source 1..23: mol_type = genomic DNA
ttaagtagtcatcctagttatgg

SEQ ID NO: 10421 - DNA, 23 bp, Homo sapiens
  source 1..23: mol_type = genomic DNA
tctaaactataaactcctatagg

SEQ ID NO: 10422 - DNA, 23 bp, Homo sapiens
  source 1..23: mol_type = genomic DNA
agaaacggacagaaatcatttgg

SEQ ID NO: 10423 - DNA, 23 bp, Homo sapiens
  source 1..23: mol_type = genomic DNA
ggtaatataatttagttaaaggg

SEQ ID NO: 10424 - DNA, 23 bp, Homo sapiens
  source 1..23: mol_type = genomic DNA
aaaggagctattatgatttaggg

SEQ ID NO: 10425 - DNA, 23 bp, Homo sapiens
  source 1..23: mol_type = genomic DNA
tctaatgtgctacaacaaaatgg

SEQ ID NO: 10426 - DNA, 23 bp, Homo sapiens
  source 1..23: mol_type = genomic DNA
tcttatgtcttattacttgatgg

SEQ ID NO: 10427 - DNA, 23 bp, Homo sapiens
  source 1..23: mol_type = genomic DNA
atacatggacgttttccttatgg

SEQ ID NO: 10428 - DNA, 23 bp, Homo sapiens
  source 1..23: mol_type = genomic DNA
ataatattgctaactaataatgg

SEQ ID NO: 10429 - DNA, 23 bp, Homo sapiens
  source 1..23: mol_type = genomic DNA
cgacatctataatagcaaaaagg

SEQ ID NO: 10430 - DNA, 23 bp, Homo sapiens
  source 1..23: mol_type = genomic DNA
gttcttatgtcagcattaattgg

SEQ ID NO: 10431 - DNA, 23 bp, Homo sapiens
  source 1..23: mol_type = genomic DNA
ctataagttgattttcaatatgg

SEQ ID NO: 10432 - DNA, 23 bp, Homo sapiens
  source 1..23: mol_type = genomic DNA
ggagtacagaggaaccacaccgg

SEQ ID NO: 10433 - DNA, 23 bp, Homo sapiens
  source 1..23: mol_type = genomic DNA
aaaatgtagctggagtacagagg

SEQ ID NO: 10434 - DNA, 23 bp, Homo sapiens
  source 1..23: mol_type = genomic DNA
ggttactacactatccggtgtgg

SEQ ID NO: 10435 - DNA, 23 bp, Homo sapiens
  source 1..23: mol_type = genomic DNA
gaacaaatggagatcaccagagg

SEQ ID NO: 10436 - DNA, 23 bp, Homo sapiens
  source 1..23: mol_type = genomic DNA
aaggagataccatactctggagg

SEQ ID NO: 10437 - DNA, 23 bp, Homo sapiens
  source 1..23: mol_type = genomic DNA
acatcattttgatataagagggg

SEQ ID NO: 10438 - DNA, 23 bp, Homo sapiens
  source 1..23: mol_type = genomic DNA
atagacatggaaaggtgacaagg

SEQ ID NO: 10439 - DNA, 23 bp, Homo sapiens
  source 1..23: mol_type = genomic DNA
tgagctatgtgcttttcgcgggg

SEQ ID NO: 10440 - DNA, 23 bp, Homo sapiens
  source 1..23: mol_type = genomic DNA
atgggtatgaatgcgtacagtgg

SEQ ID NO: 10441 - DNA, 23 bp, Homo sapiens
  source 1..23: mol_type = genomic DNA
aggagacagtcagatcctcatgg

SEQ ID NO: 10442 - DNA, 23 bp, Homo sapiens
  source 1..23: mol_type = genomic DNA
ggttgaggaagtcatcctaaggg

SEQ ID NO: 10443 - DNA, 23 bp, Homo sapiens
  source 1..23: mol_type = genomic DNA
tcctcatggtaaaagcagcatgg

SEQ ID NO: 10444 - DNA, 23 bp, Homo sapiens
  source 1..23: mol_type = genomic DNA
cattttttacaggatacatgtgg

SEQ ID NO: 10445 - DNA, 23 bp, Homo sapiens
  source 1..23: mol_type = genomic DNA
gggtgataaggaggtgacaacgg

SEQ ID NO: 10446 - DNA, 23 bp, Homo sapiens
  source 1..23: mol_type = genomic DNA
tatgcatgaatgtactgtgtagg

SEQ ID NO: 10447 - DNA, 23 bp, Homo sapiens
  source 1..23: mol_type = genomic DNA
atggaaatagttagaaacacggg

SEQ ID NO: 10448 - DNA, 23 bp, Homo sapiens
  source 1..23: mol_type = genomic DNA
acatattgaacaaagagccaagg

SEQ ID NO: 10449 - DNA, 23 bp, Homo sapiens
  source 1..23: mol_type = genomic DNA
gccatgctgcttttaccatgagg

SEQ ID NO: 10450 - DNA, 23 bp, Homo sapiens
  source 1..23: mol_type = genomic DNA
gggtctgagagaaagagtaaggg

SEQ ID NO: 10451 - DNA, 23 bp, Homo sapiens
  source 1..23: mol_type = genomic DNA
cctctgattcacaggaaaagcgg

SEQ ID NO: 10452 - DNA, 23 bp, Homo sapiens
  source 1..23: mol_type = genomic DNA
acagcgctaattgattgtgtcgg

SEQ ID NO: 10453 - DNA, 23 bp, Homo sapiens
  source 1..23: mol_type = genomic DNA
catggaaatagttagaaacacgg

SEQ ID NO: 10454 - DNA, 23 bp, Homo sapiens
  source 1..23: mol_type = genomic DNA
tgccactttttaaattacggtgg

SEQ ID NO: 10455 - DNA, 23 bp, Homo sapiens
  source 1..23: mol_type = genomic DNA
ttaatacaaaaggcaaggagtgg

SEQ ID NO: 10456 - DNA, 23 bp, Homo sapiens
  source 1..23: mol_type = genomic DNA
gatcctttctggactaaaagggg

SEQ ID NO: 10457 - DNA, 23 bp, Homo sapiens
  source 1..23: mol_type = genomic DNA
gcttaatattattcatacaaggg

SEQ ID NO: 10458 - DNA, 23 bp, Homo sapiens
  source 1..23: mol_type = genomic DNA
atatattaaatattgtctggagg

SEQ ID NO: 10459 - DNA, 23 bp, Homo sapiens
  source 1..23: mol_type = genomic DNA
atgagaaactgattagaggatgg

SEQ ID NO: 10460 - DNA, 23 bp, Homo sapiens
  source 1..23: mol_type = genomic DNA
tcttatcagatatttgtgaaggg

SEQ ID NO: 10461 - DNA, 23 bp, Homo sapiens
  source 1..23: mol_type = genomic DNA
tgtcggtttgcgtaagcatgagg

SEQ ID NO: 10462 - DNA, 23 bp, Homo sapiens
  source 1..23: mol_type = genomic DNA
aaatttcctgctaggaacagtgg

SEQ ID NO: 10463 - DNA, 23 bp, Homo sapiens
  source 1..23: mol_type = genomic DNA
ggggtaagaactctgatgctggg

SEQ ID NO: 10464 - DNA, 23 bp, Homo sapiens
  source 1..23: mol_type = genomic DNA
agaaagttggtatatatccatgg

SEQ ID NO: 10465 - DNA, 23 bp, Homo sapiens
  source 1..23: mol_type = genomic DNA
ccgcttttcctgtgaatcagagg

SEQ ID NO: 10466 - DNA, 23 bp, Homo sapiens
  source 1..23: mol_type = genomic DNA
agtaacttttgtattaggagagg

SEQ ID NO: 10467 - DNA, 23 bp, Homo sapiens
  source 1..23: mol_type = genomic DNA
taaagaataaacagactcaaagg

SEQ ID NO: 10468 - DNA, 23 bp, Homo sapiens
  source 1..23: mol_type = genomic DNA
agccaccgtaatttaaaaagtgg

SEQ ID NO: 10469 - DNA, 23 bp, Homo sapiens
  source 1..23: mol_type = genomic DNA
ctttccatactctatggcacagg

SEQ ID NO: 10470 - DNA, 23 bp, Homo sapiens
  source 1..23: mol_type = genomic DNA
cttttggataaagaataccttgg

SEQ ID NO: 10471 - DNA, 23 bp, Homo sapiens
  source 1..23: mol_type = genomic DNA
acacgggtcaacaacaagcttgg

SEQ ID NO: 10472 - DNA, 23 bp, Homo sapiens
  source 1..23: mol_type = genomic DNA
tcaaattatcgtaatttgagagg

SEQ ID NO: 10473 - DNA, 23 bp, Homo sapiens
  source 1..23: mol_type = genomic DNA
atcaagaccaagatactagcagg

SEQ ID NO: 10474 - DNA, 23 bp, Homo sapiens
  source 1..23: mol_type = genomic DNA
gttctgctgagattagtgatagg

SEQ ID NO: 10475 - DNA, 23 bp, Homo sapiens
  source 1..23: mol_type = genomic DNA
ttagctcatattctaatgatcgg

SEQ ID NO: 10476 - DNA, 23 bp, Homo sapiens
  source 1..23: mol_type = genomic DNA
tggcacaggatgaagtcaaccgg

SEQ ID NO: 10477 - DNA, 23 bp, Homo sapiens
  source 1..23: mol_type = genomic DNA
tcaaaccagtgctagaaagttgg

SEQ ID NO: 10478 - DNA, 23 bp, Homo sapiens
  source 1..23: mol_type = genomic DNA
ttaccccttttagtccagaaagg

SEQ ID NO: 10479 - DNA, 23 bp, Homo sapiens
  source 1..23: mol_type = genomic DNA
ctttctagcactggtttgagagg

SEQ ID NO: 10480 - DNA, 23 bp, Homo sapiens
  source 1..23: mol_type = genomic DNA
catggtaaaagcagcatggccgg

SEQ ID NO: 10481 - DNA, 23 bp, Homo sapiens
  source 1..23: mol_type = genomic DNA
aggaaaatatttaaaactgatgg

SEQ ID NO: 10482 - DNA, 23 bp, Homo sapiens
  source 1..23: mol_type = genomic DNA
tatgagctatgtgcttttcgcgg

SEQ ID NO: 10483 - DNA, 23 bp, Homo sapiens
  source 1..23: mol_type = genomic DNA
gggaatgagaaactgattagagg

SEQ ID NO: 10484 - DNA, 23 bp, Homo sapiens
  source 1..23: mol_type = genomic DNA
atataccaactttctagcactgg

SEQ ID NO: 10485 - DNA, 23 bp, Homo sapiens
  source 1..23: mol_type = genomic DNA
tatatctgaatctcaagaatcgg

SEQ ID NO: 10486 - DNA, 23 bp, Homo sapiens
  source 1..23: mol_type = genomic DNA
cacatcattttgatataagaggg

SEQ ID NO: 10487 - DNA, 23 bp, Homo sapiens
  source 1..23: mol_type = genomic DNA
ggattattcctctgattcacagg

SEQ ID NO: 10488 - DNA, 23 bp, Homo sapiens
  source 1..23: mol_type = genomic DNA
atatttttaaatttcctgctagg

SEQ ID NO: 10489 - DNA, 23 bp, Homo sapiens
  source 1..23: mol_type = genomic DNA
tgacgattcaatcgttttggtgg

SEQ ID NO: 10490 - DNA, 23 bp, Homo sapiens
  source 1..23: mol_type = genomic DNA
actctttctctcagacccattgg

SEQ ID NO: 10491 - DNA, 23 bp, Homo sapiens
  source 1..23: mol_type = genomic DNA
aagagtaaggggtgataaggagg

SEQ ID NO: 10492 - DNA, 23 bp, Homo sapiens
  source 1..23: mol_type = genomic DNA
tgacaaggttgatttagaaaagg

SEQ ID NO: 10493 - DNA, 23 bp, Homo sapiens
  source 1..23: mol_type = genomic DNA
tagcaggtcccagaagtcattgg

SEQ ID NO: 10494 - DNA, 23 bp, Homo sapiens
  source 1..23: mol_type = genomic DNA
ttaaggaatcctcatagaaatgg

SEQ ID NO: 10495 - DNA, 23 bp, Homo sapiens
  source 1..23: mol_type = genomic DNA
ttgcatactgtaaaaaagaatgg

SEQ ID NO: 10496 - DNA, 23 bp, Homo sapiens
  source 1..23: mol_type = genomic DNA
cctattgattatgctccaaatgg

SEQ ID NO: 10497 - DNA, 23 bp, Homo sapiens
  source 1..23: mol_type = genomic DNA
acataatttagagcattaatggg

SEQ ID NO: 10498 - DNA, 23 bp, Homo sapiens
  source 1..23: mol_type = genomic DNA
gataataacacttttaaaaaggg

SEQ ID NO: 10499 - DNA, 23 bp, Homo sapiens
  source 1..23: mol_type = genomic DNA
tctcaaattacgataatttgagg

SEQ ID NO: 10500 - DNA, 23 bp, Homo sapiens
  source 1..23: mol_type = genomic DNA
ggatggactaaaacgtttccagg

SEQ ID NO: 10501 - DNA, 23 bp, Homo sapiens
  source 1..23: mol_type = genomic DNA
ccatttggagcataatcaatagg

SEQ ID NO: 10502 - DNA, 23 bp, Homo sapiens
  source 1..23: mol_type = genomic DNA
gcacatcattttgatataagagg

SEQ ID NO: 10503 - DNA, 23 bp, Homo sapiens
  source 1..23: mol_type = genomic DNA
ttagagagccttatcagaattgg

SEQ ID NO: 10504 - DNA, 23 bp, Homo sapiens
  source 1..23: mol_type = genomic DNA
ttagttggtcctccagagtatgg

SEQ ID NO: 10505 - DNA, 23 bp, Homo sapiens
  source 1..23: mol_type = genomic DNA
tcatcctgtgccatagagtatgg

SEQ ID NO: 10506 - DNA, 23 bp, Homo sapiens
  source 1..23: mol_type = genomic DNA
attaaagacgtttagcaaaatgg

SEQ ID NO: 10507 - DNA, 23 bp, Homo sapiens
  source 1..23: mol_type = genomic DNA
cattttctctttcttctaatggg

SEQ ID NO: 10508 - RNA, 282 nt, Homo sapiens
  source 1..282: mol_type = genomic RNA
gtgcatggacatcctggagctgtcggagcgcctggacctgcagcgcttccactcgcacaccctgcgcctctaccgcgctgtgtgcgccctgggcaacaatcgcgtggcgcacgctctgtgcagccacgtagaccaagctcagctgctgcacgccctggaggacgcgcacctgccaggcccactgcgcgcaggctactatgacctcctcatcagcatccacctcgaaagtgcctgccgcagccgccgctccatgctctctgaatacatcgtgcccctcacgcc

SEQ ID NO: 10509 - protein, 94 aa, Homo sapiens
CMDILELSERLDLQRFHSHTLRLYRAVCALGNNRVAHALCSHVDQAQLLHALEDAHLPGPLRAGYYDLLISIHLESACRSRRSMLSEYIVPLTP

SEQ ID NO: 10510 - DNA, 197 bp, Homo sapiens
  source 1..197: mol_type = genomic DNA
gacgcccacctttggcctcctcccactatccaggtgcccctggtaatctttaagcgggagaaggagctggcccggaagctggagtttgatggcctgtacatcacggagcagcctgaggacgatgacgtgaaggggcagtgggaccgactggtgctcaacacgccgtaaggacccagcccccacctcagggtggcagc

SEQ ID NO: 10511 - protein, 43 aa, Homo sapiens
VPLVIFKREKELARKLEFDGLYITEQPEDDDVKGQWDRLVLNT

SEQ ID NO: 10512 - DNA, 109 bp, Homo sapiens
  source 1..109: mol_type = genomic DNA
agtataaaatacagagctaagacaagaacgtttcattggctttgatttccagttcttaggcaactgtttctctctcagcaaacacattactctcactattcagcctaag

SEQ ID NO: 10513 - DNA, 109 bp, synthetic construct
  source 1..109: mol_type = other DNA
agtataaaatacagagctaagacaagaacgtttcattggctttgatttccagttcttaggcaactgtttctctctcaacaaacacattactctcactattcagcctaag

SEQ ID NO: 10514 - DNA, 75 bp, Mus musculus
  source 1..75: mol_type = genomic DNA
gaacatatgaataaacttcgaaaatttcaggtaagccgaggtttggcctttaaactatattttttcacatagcaa

SEQ ID NO: 10515 - DNA, 62 bp, synthetic construct
  source 1..62: mol_type = other DNA
gaacatatgaatatcaggtaagccgaggtttggcctttaaactatattttttcacatagcaa

SEQ ID NO: 10516 - DNA, 49 bp, synthetic construct
  source 1..49: mol_type = other DNA
gaacatatgaataggtttggcctttaaactatattttttcacatagcaa

SEQ ID NO: 10517 - DNA, 75 bp, synthetic construct
  source 1..75: mol_type = other DNA
gaacatatgaataaacttcgaaaatnnnnttcaggtaagccgaggtttggcctttaaactatattttttcacata

SEQ ID NO: 10518 - DNA, 48 bp, synthetic construct
  source 1..48: mol_type = other DNA
gaacatatgaatagtttggcctttaaactatattttttcacatagcaa

SEQ ID NO: 10519 - DNA, 75 bp, synthetic construct
  source 1..75: mol_type = other DNA
gaacatatgaataaacttcgaaaatnnnnnnnttcaggtaagccgaggtttggcctttaaactatattttttcac

SEQ ID NO: 10520 - DNA, 50 bp, synthetic construct
  source 1..50: mol_type = other DNA
gaacatatgaataaggtttggcctttaaactatattttttcacatagcaa

SEQ ID NO: 10521 - DNA, 74 bp, synthetic construct
  source 1..74: mol_type = other DNA
gaacatatgaataaacttcgaaaattcaggtaagccgaggtttggcctttaaactatattttttcacatagcaa

SEQ ID NO: 10522 - DNA, 75 bp, synthetic construct
  source 1..75: mol_type = other DNA
gaacatatgaataaacttcgaaaatnnnnnnnnnnnttcaggtaagccgaggtttggcctttaaactatattttt

SEQ ID NO: 10523 - DNA, 75 bp, synthetic construct
  source 1..75: mol_type = other DNA
gaacatatgaataaacttcgaaaatnnnnnnttcaggtaagccgaggtttggcctttaaactatattttttcaca

SEQ ID NO: 10524 - DNA, 57 bp, synthetic construct
  source 1..57: mol_type = other DNA
gaacatatgaatataagccgaggtttggcctttaaactatattttttcacatagcaa

SEQ ID NO: 10525 - DNA, 60 bp, synthetic construct
  source 1..60: mol_type = other DNA
gaacatatgaataaacttcgacgaggtttggcctttaaactatattttttcacatagcaa

SEQ ID NO: 10526 - DNA, 75 bp, synthetic construct
  source 1..75: mol_type = other DNA
gaacatatgaataaacttcgaaaatnnnnnttcaggtaagccgaggtttggcctttaaactatattttttcacat

SEQ ID NO: 10527 - DNA, 70 bp, synthetic construct
  source 1..70: mol_type = other DNA
gaacatatgaataaacttcgatcaggtaagccgaggtttggcctttaaactatattttttcacatagcaa

SEQ ID NO: 10528 - DNA, 51 bp, synthetic construct
  source 1..51: mol_type = other DNA
gaacatatgaatagaggtttggcctttaaactatattttttcacatagcaa

SEQ ID NO: 10529 - DNA, 75 bp, synthetic construct
  source 1..75: mol_type = other DNA
gaacatatgaataaacttcgaaaatnnnnnnnnnnnnnnttcaggtaagccgaggtttggcctttaaactatatt

SEQ ID NO: 10530 - DNA, 68 bp, synthetic construct
  source 1..68: mol_type = other DNA
gaacatatgaataaacttttcaggtaagccgaggtttggcctttaaactatattttttcacatagcaa

SEQ ID NO: 10531 - DNA, 46 bp, synthetic construct
  source 1..46: mol_type = other DNA
gaacatatgaagtttggcctttaaactatattttttcacatagcaa

SEQ ID NO: 10532 - DNA, 75 bp, synthetic construct
  source 1..75: mol_type = other DNA
gaacatatgaataaacttcgaaaatnnnnnnnnnnttcaggtaagccgaggtttggcctttaaagtatatttttt

SEQ ID NO: 10533 - DNA, 60 bp, synthetic construct
  source 1..60: mol_type = other DNA
gaacatatgaataaggtaagccgaggtttggcctttaaactatattttttcacatagcaa

SEQ ID NO: 10534 - DNA, 75 bp, synthetic construct
  source 1..75: mol_type = other DNA
gaacatatgaataaacttcgaaaatnnnnnttcaggtaagcggaggtttggcctttaaactatattttttcacat

SEQ ID NO: 10535 - DNA, 57 bp, synthetic construct
  source 1..57: mol_type = other DNA
gaacatatgaataaacttcgaggtttggcctttaaactatattttttcacatagcaa

SEQ ID NO: 10536 - DNA, 49 bp, synthetic construct
  source 1..49: mol_type = other DNA
gaacatatgaagaggtttggcctttaaactatattttttcacatagcaa

SEQ ID NO: 10537 - DNA, 71 bp, synthetic construct
  source 1..71: mol_type = other DNA
gaacatatgaataaacttcgattcaggtaagccgaggtttggcctttaaactatattttttcacatagcaa

SEQ ID NO: 10538 - DNA, 54 bp, synthetic construct
  source 1..54: mol_type = other DNA
gaacatatgaaaagccgaggtttggcctttaaactatattttttcacatagcaa

SEQ ID NO: 10539 - DNA, 68 bp, synthetic construct
  source 1..68: mol_type = other DNA
gaacatatgaataaacttcgaaggtaagccgaggtttggcctttaaactatattttttcacatagcaa

SEQ ID NO: 10540 - DNA, 61 bp, synthetic construct
  source 1..61: mol_type = other DNA
gaacatatgaattcaggtaagccgaggtttggcctttaaactatattttttcacatagcaa

SEQ ID NO: 10541 - DNA, 58 bp, synthetic construct
  source 1..58: mol_type = other DNA
gaacatatgaaaggtaagccgaggtttggcctttaaactatattttttcacatagcaa

SEQ ID NO: 10542 - DNA, 57 bp, synthetic construct
  source 1..57: mol_type = other DNA
gaacatatgaatgtaagccgaggtttggcctttaaactatattttttcacatagcaa

SEQ ID NO: 10543 - DNA, 66 bp, synthetic construct
  source 1..66: mol_type = other DNA
gaacatatgaataaacttcaggtaagccgaggtttggcctttaaactatattttttcacatagcaa

SEQ ID NO: 10544 - DNA, 57 bp, synthetic construct
  source 1..57: mol_type = other DNA
gaacatatgaaggtaagccgaggtttggcctttaaactatattttttcacatagcaa

SEQ ID NO: 10545 - DNA, 75 bp, synthetic construct
  source 1..75: mol_type = other DNA
gaacatatgaataaacttcgaaaatnnnttcaggtaagcggaggtttggcctttaaactatattttttcacatag

SEQ ID NO: 10546 - DNA, 72 bp, synthetic construct
  source 1..72: mol_type = other DNA
gaacatatgaataaacttcgaattcaggtaagccgaggtttggcctttaaactatattttttcacatagcaa

SEQ ID NO: 10547 - DNA, 75 bp, synthetic construct
  source 1..75: mol_type = other DNA
gaacatatgaataaacttcgaaaatnnnnnnnttcaggtaagcggaggtttggcctttaaactatattttttcac

SEQ ID NO: 10548 - DNA, 75 bp, synthetic construct
  source 1..75: mol_type = other DNA
gaacatatgaataaacttcgaaaatnnnnnnnnnnttgaggtaaggtttggtttggcctttaaactatatttttt

SEQ ID NO: 10549 - DNA, 75 bp, synthetic construct
  source 1..75: mol_type = other DNA
gaacatatgaataaacttcgaaaatnnnnttcaggtaagcggaggtttggcctttaaactatattttttcacata

SEQ ID NO: 10550 - DNA, 45 bp, synthetic construct
  source 1..45: mol_type = other DNA
gaacatatgagtttggcctttaaactatattttttcacatagcaa

SEQ ID NO: 10551 - DNA, 70 bp, synthetic construct
  source 1..70: mol_type = other DNA
gaacatatgaataaacttcgaaaatgtaagccgaggtttggcctttaaactatattttttcacatagcaa

SEQ ID NO: 10552 - DNA, 59 bp, synthetic construct
  source 1..59: mol_type = other DNA
gaacatatgaataggtaagccgaggtttggcctttaaactatattttttcacatagcaa

1. A method of treating a subject with Duchenne muscular dystrophy (DMD), comprising:
administering to the subject a composition comprising an adeno-associated viral vector, an RNA-guided nuclease or nickase or a DNA endonuclease, and at least one dystrophin-targeted guide RNA in amount sufficient to delete a skippable exon encoding the dystrophin gene,
wherein the subject with DMD has a mutation causing a frameshift in the dystrophin gene and wherein the deletion of the skippable exon prevents the frameshift.

2. The method of claim 1, wherein the DNA endonuclease is a Cas9 endonuclease or a Cpf1 endonuclease.

3. The method of claim 1, wherein the composition comprises two dystrophin-targeted guide RNAs that recognize different DNA sequences.

4. The method of claim 1, wherein the skippable exon is selected from the group consisting of exon 2, exon 8, exon 17, exon 43, exon 44, exon 45, exon 46, exon 50, exon 51, exon 52, exon 53, and exon 55.

5. The method of claim 1, wherein the mutation is a deletion, an insertion, a duplication, or a translocation.

6. The method of claim 5, wherein the mutation is a deletion of exons 3-7, 3-19, 3-21, 4-7, 5-7, 6-7, 12-16, 18-33, 18-41, 18-44, 44, 44-47, 44-49, 44-51, 14-43, 19-43, 30-43, 35-43, 36-43, 40-43, 42-43, 45, 45-54, 12-44, 18-44, 46-47, 46-48, 46-49, 46-51, 46-53, 46-55, 21-45, 47-54, 47-56, 51, 51-53, 51-55, 45-50, 47-50, 48-50, 49-50, 50, 52, 52-63, 53, 53-55, 10-52, 45-52, 46-52, 47-52, 48-52, 49-52, 50-52, 45-54, or 48-54 of the dystrophin gene.

7. The method of claim 1, wherein the skippable exon is selected from the list in Table 1, based on the deleted exon or deleted exons that specifically occur in the dystrophin gene of the subject.

8. The method of claim 1, wherein preventing the frameshift in the dystrophin gene results in partial or complete restoration of dystrophin protein activity.

9. A method of treating a subject with Duchenne muscular dystrophy (DMD), comprising:
administering to the subject a composition comprising an adeno-associated viral vector, an RNA-guided nuclease or nickase or a DNA endonuclease, and at least one dystrophin targeted guide RNA in amount sufficient to restore the reading frame of the dystrophin gene in the subject;
wherein the dystrophin targeted guide RNA recognizes a target site in the dystrophin gene selected from the sequences identified in Table 2.

10. The method of claim 9, wherein the DNA endonuclease is a Cas9 endonuclease or a Cpf1 endonuclease.

11. The method of claim 9, wherein the composition comprises two dystrophin-targeted guide RNAs that recognize different target sites.

12. The method of claim 9, wherein one or more target sites recognized by the at least one dystrophin targeted guide RNA occur in an intron of the dystrophin gene.

13. The method of claim 9, wherein restoration of the reading frame of the dystrophin gene results in partial or complete restoration of dystrophin protein activity.

14. A method of treating a subject with a genetic disease or disorder, comprising a gene editing strategy comprising:
administering to the subject a composition comprising an adeno-associated viral vector, an RNA-guided nuclease or nickase or a DNA endonuclease, at least one guide RNA, and optionally a donor DNA template in an amount sufficient to
(i) delete a skippable exon encoding a mutated gene, wherein such deletion prevents a frameshift of the mutated gene; or
(ii) correct the DNA sequence of the mutated gene via homology directed repair (HDR) wherein the mutated gene is associated with the cause of the disease or disorder; and
wherein said method of treatment reduces at least one symptom associated with the disease or disorder.

15. The method of claim 14, wherein the DNA endonuclease is a Cas9 endonuclease or a Cpf1 endonuclease.

16. The method of claim 14, wherein the composition comprises two guide RNAs that recognize different target sites.

17. The method of claim 14, wherein the genetic disease or disorder is a muscle-related disease or disorder selected from the group consisting of Hypertrophic cardiomyopathy (HCM or CMH), amyotrophic lateral sclerosis, Becker's muscular dystrophy, central core disease, centronuclear myopathy (including myotubular myopathy), Charcot-Marie-Tooth disease, congenital muscular dystrophy, congenital myasthenic syndrome, Dejerine-Sottas disease, dermatomyositis, Duchenne muscular dystrophy, Emery-Dreifuss muscular dystrophy, facioscapulohumeral muscular dystrophy, Friedreich's ataxia, hyperthyroid myopathy, hypothyroid myopathy, inclusion body myositis, Lambert-Eaton myasthenic syndrome, Limb-girdle muscular dystrophy, mitochondrial myopathy, myasthenia gravis, myotonia congenita (including Thomsen's disease and Becker disease), nemaline myopathy, paramyotonia congenita, periodic paralysis (including hypokalemic and hyperkalemic), polymyositis, spinal and bulbar muscular atrophy, and spinal muscular atrophy.

18. The method of claim 14, wherein the donor DNA template comprises a correct DNA sequence for insertion in the mutated gene via a homology directed repair mechanism.

19. The method of claim 14, wherein the at least one guide RNA recognizes a target site in a gene selected from the group consisting of MYH7, TNNT2, TPM1, MYBPC3, PRKAG2, TNNI3, MYL3, TNN, MYL2, ACTC1, CSRP3, TNNC1, MYH6, VCL, MYOZ2, JPH2, PLN, CALR3, NEXN, MYPN, ACTN2, LDB3, TCAP, FLNC, SOD1, C90RF72, and RYR.

20. The method of claim 14, wherein the disease or disorder is suitable for treatment by an exon skipping therapeutic strategy.

21.-22. (canceled)
